United States Patent Application Publication US 2026/0265781 A1 - sequence listing, part 14

SEQ ID NO: 118 - DNA, 18231092 bp, synthetic construct (residues 2,025,678-4,051,354 of 18,231,092)
  source 1..18231092: mol_type = other DNA; note = Hot spot 2 - Chr 3 contig ref|NW_020822577.1 from Cricetulus griseus
tggttgcctgtgttaacctgtgaaaaatctgttaaaatgtagcacccatgacatgttttcaagtcactgggtagaggaggtagaatttcatgacatcttgtagacaaaaaaaaaaatcaagttcaatttctggaaatttattactatcccagagacttaacttcccataagcagaagaggaagaacacacgtgatcaagctgctgtaaggaccacgtgatacctcacactgtccagtgagcacgcatgggtttcttacttgccaggccgctggggttggtacactggccccccttccaatccatattcattacatcattggattgagcaccatgcttgaggcaaccacaagctagaggttggaatactgtttcaggaatgaagttaagacttgcctgtggtagctaatcttggttatcaactgtatcagattgagaaatgcctgaaaattagggaagcatagccctgggcatttctggagaggattcattgcagacataaagcctgtcttgaatgtgggtgccaagggctcacaggcaggagtcagaatggaataaggggggggggagggagaagctgctttgctgaagactctcctctctctccctctctctctcctttctgccccccttctctttctctctctcccatctcattccctttctgtctttgcttgctggcttttatgagaagatgaactgaaatgtctggaacaatgggtccaaataaaccctccctctgttacgttgctctccggaggagataggaggcggacacgatgcatgtttaagcagagaagggttgcgaggtaatctgtcatattttaaaacggtctttgctttgacctttgcttgctgttacttgcctttggattgtaccttggggtgagttgtggagatggaagaagatcttgaaagtgcacagcactgtggacagacagcaaaacctccaagtactgagggatgagcttggcggtccgggagacctacactgtcctgcagtgtgggactcatagtggcctgtggttgtgtcggggactgtgattttgtacagtggacctggttttatatcttgttctgccactacacatcctcccaccccctacccctcacccctgccacattagtccctggggtctgctccctatttgtagtaacacaaaatttcaaattcatcatggccaagtgggatagaggggccaggaaggaggactgcgccaagtgccaagtagaaaaaggaagaatgagaagggaggggagaggaggggaggggaggggaggagaggttggagaagggaaacctagagggaggtgaggagagtgaggaagtgagcttgagggcaggtggggagggtaaaggtggatgaatgcaaacgggagctcaggaagcagacaagcttgctctcacattttggctctgatccttcctggcctggcctaggcaagctgcttcacctccccaagcccacagctccctcctgagagagctaatcatagcttttgctgcagaaagttgtaagatatgattcagactgtaaacaccaggttagcactcaataaatggttaatgtagtcagagcattcaggcaaaggtcctgcactgctaaaagtcttgggtttagacagcctccttgtacaccacttaaagagacaaattgcactgaaaagcagagatattggaaaggggaactccaaggttctggtgagtacagaccccagctccaggtttcaaagctgaagaactggggtgagtgaaaagagctggtcacagtcactcagttccatcagctgtgcttctacccattgtctttcaaggcagtgcaatacgtcatccacccttctaacctccaaggggaccattcgggctcctgtaatgtgagctgctccaggatgctgccctctccatcatggaaaactgctctcatcttggagcagtctgtgttggctgccaggtcatgctgttcctagaatccaaggtgaccacaggtttagggcaatgattctgtgcctgtaggctttaaggggggatcacagaggctaagggtcactgtgttcttaggcagtcatacctagtttttaactggacacaaaagtaggcatgccttggaagagagagacttgattgagggattgtccccatcatattgacccatagccctgattttggggtcattttactaattgctacttggtgtagaagggcctagaccactgagcttcagttcctgcttgaattcctgccttggttcccctcaatgattcactgtaacttgtaagccaaataaaacttttcctctccaagttgattttggtcagttttcatcacagcaacaatcccaaactaggataatgatagtgaaagtctaaattaaaatgattgaagaaataataaaaaaagatcaagaggaaatttggggccagggggtagcggagtagaatgtggagattaaggaaggagggggagggctggagagagagctcagtagaggacctgggttcaattcccagcacacacatggcagttcgtacccatctgtaacaccaggtccagggcatctaatgcctccatgggtaccaggctcatatatggcacacatgcatatatgcagacaaaacactcacacacataaaataaaaattattaaaaatacataatttgtttttaaaggtgggaaaggttacctagaaacatttgcttttgaacaccgaagtcccttgactgtggcatgtcctcagccctcttccacagtctattcctttttcctaccagtggccacaaccttccaccagataagtattttccagttaatcacctactgtcctgcttaggagctttgtgacattttcctgattccttctcccttgcaggaggggcggttgcacctgctacttgggtcagtcagtaggaactaaaagttcattgaagacagaatagaactgtcagctctgagaatggaaagagatctaagcctaccccacttaagtatagtgttcccgatggctctctctcacccaccaatatgttctgtttactttactccaatgtatgcatcgaattctacttgacacctgtcctcttactgcatctcagtttttcctagagttctattgtttgtttctactttagtcccttccactctttctccaaagacaaagtagtcatcctcctgcccccaagcgctgaacctccccaacagctccccattgtaagtagataaaatccagacatacctcttgctcataaagccctatacacccctcctcacaacctagcttttcgctcaccctctgctcttgcactctgcctccaggcaccctgaagacatttgctttttcccaagttccctgcaaatccaagctttgttccttccccacttcagggccatttcttcctttgtgtgtctgccaatttccatctcttgtctctttgtcttgagtggttttagcttaaaagctatgctctgatgggcttcaaattattactccatatgaaagtcacccagcttctccgatcacacagcagggtcttgtttctttacacatgcatttgtcctctgtctgtggcggggcaggggcggggaggttgcaggtaattgtgtaatgtctcttcctccctagactatagtttccaggggagcagagattttacttatactgttcataaaatcttttctctttggtcagaaatatgaccagcatataatatcgactcagtaattatttcagtgaatgttgctaaatagatgattcaacctctaaatacagaaccttcaccagcatcatgtgatatatatatatatatatatatatatatatatatatactcatacacataatatagaaataaatgaactttttaaaaaaagattgttaggcaaatacaaagtatccattttattgtgactgcaaaactaggtcatgaaacaaattagtcactctaagaggcagaaagacttgagcaaaaggcttttcagaatctttgtagatttcactgaatagttggaaatgccaggtcttgccaaacctcatcatggaattcaactattagataatatataacagagaaaaatagttacaagacaaagtcaatagttttccagcttgagacagagggaagaaaggtggagagaggggaaagagtggcagagctgtgtgccacccacagtgtgccacctgccttccctgcagtgagtcacctcacacagagagggccaaggcagcatgggagctgggcttgaggcctccaacaagactgacatggaagtcagcatggccgggtatctggacccagtgtctatatcacccctacaatttcacctcagcttcctgtgacacaggctcttaggaagagccagcagggctgcccactgggcagagacactaggaatccacagcaacaaccaatagaagtgatcgggcagggcctgcactcagctcaatgcagcaaagagtgtaggagaaatgaccagaggggccaagaatgcttactaacagagtgctccaggatgctcacacttgagtgttctcattaatggctaacaaaggaagagcctgaccctggctggtgctttcttctgccagtgccaagagatgctgtgaatatgccctttcccctaggtgttatctgaagggatccaggaaagacaagattgagaaatgaagcgtaaatgtttccaatgtacagttaacaccgaggtgtctggtatgaattagcggcttagatgaacttttaaattcatgagacacatttccttaaagaaaaaaaaagttctatgccatgtatcatgagagctatgaggaagtccagagtagttttagccaaatcatgaatctgtatttatgtaggtatccgtggtttgctttgtatcctattctatggtgttaaagtgaaatacatgctttctaacacccggggtattcaatggatcataattgctgtctctagaggataggaaattaattatgctagcacttggggctgggcagatggctcagtggttaaagtgctggctgcacaaatgtagaggttggatgcatagcatggatgcccttgacctgagcactcctatgggctaggaaggcggggagggagagtcctgcagctgagaacagcacaaaagagaggctgtctcagatggggtgtgactcgaggtattctccaacctctgcacttgtaccatgacacacacatgcccacactcatacatgcggaggcacacatgcatacttacaggctacacacacatactaactccaaattcctaaataggttgtctagttatggctgttaggaagctttgaatccatcactgtgcattgatagaagcagatactttgagaaacagaagtaatgtagatataatacacaaagtacatgtgcagtaagacttgtttatgactctaataatagatacagacttagaacatttcctgtggaaatactttggtttatacataaaactttgtgtgctacccaacaagccaaggaaaggtaatatgttgtctagcttacaagataatggaagtttcctatggctagatttgtcataaattaaaacatctatattacatttatttgtcaagtggtataagcacacgccacagcacacaagtcaaagtcacaagatggcctggagttggctctcttccccactatgtgggttccaggaattgaactccggtcctcagacttgactgcaagacacctttgctgagatacctcgtggaatccttatcacctgtgatcaacctcaggtcctattccttctgacttcccccaaatatgctgaagcacttgctttcaactcccatgtaaaaggactggaatgtggcctcttttaaaatgtgagattcactttgcattttatgaactgctgtgtgagactttctagaatgtgcacagctcatttttcccaggctgaactcatacatatacctgtgagaagtctttgacttttttggcctgtttttgctcagaaataaagtgcagcaagtgtttttatatttaaaatttagtttttaacccccaaacaaagaacagttctaattgctttatgatgtgaggagtttgtggttcaaaagtatttcatgcagctttaaggaaacaaacaaacaaacaaacaaacaaacaaacaaaatacctccaaagctatagtcttatccaatgtaggaatagtcttggggtttaaagccaatcactgcactaacactcacacttggagtctccctataaaaatattttaaaagttcctgtggctaatagagtggatctaaaaaggaagtgagttccttcaaaaatattccagaggtttgattttttgctaataaaaacagttgtccttagaataagttttaatgactaaaaatcagctagaattactgtggctcaggctctggggatgtcgatttgggagctggtgtaggggataaagacttgttagagggtggggacgggcttggttggtaaaatgcctgcacaaaggcctgaatttgggtcctcagtatccatatcaagaggtggtcttagtgtcacttcagtactaaggagcaggacaccagaggattcctggagcttgctggccagtgtagctggaccagagagttccaggttttatgtaagactctgtctcggtaaggtaaagggtcacctgacttttactcctgtttgtgtatacatgcactcacacatgcatgcacacacacacccccacaccccctacacacacacgggaaatagaagaattattagtgaaatttcatttgttttatttttttaaagcaatatatcttggggttgtagacatcttaattaaacactgacttcatatagattattaataaattataatgggttttgaagatacatgcagcctaatagtccatgccaaaagtcctccacatagtgtgatgataacagtaacgtgctcccttcgagatctggctagtgcacggctttcattaactcctgtacaggtctctgacagagttaattgcttaagtctgttcaaaaggccaaatgactctcagggaataaaaaaaaaaaaaatgtgctggagaccagagatacagataagcgtctgggctttaatttaaagagacaagatgagttctgtgcaggaaacaaagacagtcggtctgagtctgaatggctacaactggttttttaagtgtataatgctggatcaatttaaaccccttaagatatgaataaggcattgtgagctcagaagacaagcctggtgacatagcacatccctgagccattgtatgacactgggtgttgacatataggtgggacatgctggagacacccacggtgtcagtctctcagttagcaaaacagcttggtacacatggtggactaagttcatcacccaccacgtaggctattgtgcaaattgggtccaaggtcaaaagccgactcttaaaatactttcatgtcattttaaacaattttatctccaattcatatttatcttttaaataacatcacaatactcatttctaaatttattttaaattattttgtaattatgagtatgtgtgtgcacacttgcgtctgtatgagtgcagttgcccatggaagccagaagagggcgtcagaccctctgagctagagttacaggcagttgtgaagcccaacaggtactctgtaagagatgagtatgtattcttaactgctgtgtctccatgcctgcccctccccctcactcttccctgcttcccccttctggtcaaccctcactgtatgtgtgtgtgtgtgtgtgtgtgtgtgtgtgtgtgtgtggtggtgatatattatttatgatttattaaagcttgcttgaggattcagaaagcaaagtcagccacaagtcatagaagccagatacacacctttaatcccagcagccagaagctaagaggtggtggcacacacctttaatcctagactgaagattaagaggtagacggatctctctgagttcaaggccacccagggataagctagattgaatcagtctaaaagagtaacagatcacaggcctttactcctagcactacagggatatacaagatagaagtggggtcttccgtattcagtaggaggcattcactctccagtgctgtgccaaaggaacagccaacgccaggagagctttcacgtgagctgtctcctctcatctctggaagagagacgcatgggcctgggcatgtccgagtggctggagactaggtgagaaacaccatgggtggtttgctagcctgcttgcccctcacggaggaagagccatgtccacaggaatggattgttagaagcccagagacaggaagccaagtggacatggagagagaatgagaagagacagtgcaggtagacacgcctccctcccttcacagcatcttcaaaggggccccaaagttcacagatgtgtacatgtcagcgtgggaaggtgaccagaggcgcagcagtcgctagttcgtctgcgaaggtttgatggatggatttgcttgagtagaggtctgaagtatgaaaggtaacttgatatgtgtgggggcaaacggttggcatttgtgacaagactcagaaagttatcagtccttgatgacaaattttagctttttcatttggaattgacttaagctatataggttaatttgtggtcatagaatgagaattagaaataccatttttttgttttgttttgtgtttttcagacagggtttctctatgtaacagctctggctgtcctggcgctccctctggagaccagtctggcctcaaactcactgagatccacctgcctctgcctcctgagtgttgggattaaaggcatgtgccaccaccacccagctaaaatatcatttttacgtgaccgagatgatactgggtcaattttacatttgtaaaggcgtatgtgctgtgaagagctgctgcaattaacagatgagtgtgtgtgcacatgggtgtgtgtgtgtgtgtgtgtgtgtgtgtgtgtgtgtgcgcgcgcgcgcgtgaatagacacatttgtctatgcatctgtgagtgtgcgtgtgtggctgagtgtgtgtatctatgtgtatgtatgtgagtgtacatatgtgtgtgcatttggatccaaccaatgacaacaggtgacgggctctcacgtggttcagggacatgaaactgttgaagtccggggacaggggctgtgggtgcatcaccttggtgctgaggctgcagaatccatgtctagaacactgtttgcctccttggctgattgcagcaggcttagacttgctcaccattcccggaggagtaggcaatcaagcacagacctgctctagggcaggaggcaggaaactcagttgtccctgccctgcgatggcacagctggaacctggcagggaagaagaggtcagcactactcaagaggacagagttcatgggcttgagagaaagatccacactctcaccctcaaggccatgcttccaggagggcagagctgttcaatagccaatcctgtgtaacgatgtcctttgtatttaaattcctctgtgccttcagatgtatagcatttcctcttcccaccaatacccctgaagcaccctctttatttatggttcctgtgagaggttaagtttcaaatgatgtgatagctaattttgattggtagcttgattggatccagaaacgtcctgaagattgatggtgctcaccctgcatgggtcgatggggtatccagggcccttggacataagagttctgacccagtcagaggattaagcccttcatggagtcactttattggctttactgggaggtggagaaagggagagatggggcctatcaggataaaataggtgtttcgggtctgtctctggggccccctcatgccctggctcccatcccttttctccactctccctgtttcctgccccatgtgagagagagaagctcctgtggtgctctctagccaccatggtactctgcctctcatggccccagaaacatggagtcaagtatccacagacagaatcttttgaaactatggcccacactgagccttcctcctcaagttgttcaaggcatttatccgcagagatgacaaatgtcattagtaagagcagacaatggtattatttgtctggggagtcattagaaagcaaaaatgatacaggatgtaaaatgttttggtattccaacatactacttatttaaagtagatttaaattgggcaattaggagttacataattggggctttgttttcttacccccatgctttactatttccagcaagtgtctacattttttcttctgtaaagagaactttcaaaatatgtaatggatttttatgagcaattctaatctgtggaagccccaagagagatgctcttagtcctttagtggtttccatttatttatttttttctctctttaaatttggattttgttacacaggaatcttcaagtctacacacttgtaacccagaggcacagaaaaacttgttctttcattaatgtttttcaaagaacctttgttttatctttatctttagccacatttttgggaagaataaaaagaaaatcaagaaaggggtagcacataagccaagtcatataaaagataatcactaattatttaggatctcagagccaatattactttcttcatagtgaccatctagttacttggtagggctaaattatgtcttggtgtcctgattagttttttgttggtttgtttttgtcaacttgacccaagctacagtcatctggtcagaggaacctcaattgagaaaatcctctgatcaaatttcttgtaggtaagtctgtggtacattttcttgactaatgattgatgtagaagggccttgccctctgagggcagttcctccactgagaagatagtcctaagttctatgagaaagctggcagagtctgccacgtgccctgccagagttcctaccccatcccttagtgatagagtgttccctgagagctgtgagctggaataaatcctttccttcccaagttgcttttggtcatcacagctatagaatcccaactaatggcaatgttttaatgtcacatttaaacatgtattattcactcaggagccaatagcaaaaggagctttgtctagaggagtgacttctgaaacttgctgataaaatgaattatagggcttccctctgtgagccactgtcttgcctttatgttgaaatctgaacaagttgctcagtctgcggtgaacaatgtcaatgcctttgccaggaaagttgggagggaaaggaggaaagcatctcagaattctggaaaggatccatgccacttcttcttgccagtgcccagagcaagtgtggattctgttggctcggggatcctaaagatgagagcccatggaccagtgaggacagctcaaaccattctttgattcctggatctaaactccggtctctgtagagaagttagtctagagagctcaccaataggaactgacggcttgaagaggtgtgtggagaccctttgtccctctctttgcctcgtgtttctatagatacactttatttttataactttagggcaagttatagtgtggggtttgaatataaaatgtcccccataggcacatgggtttggacacttggtccccagttggtagcgctgtttggggaggatatgggaggaaatctgtcactcaagggatagggaaggcactttgttttctctctgcttctcaagcacagttgcattttgatgggctagcttcctgctcttgtagccatgttttccctggctcccatagtgtctttctggccgtgatggactcttgttctggaacttcaaacttaaagggacctgttctccaagttgttttctgctgtatgttttatcacaataatataaattaatacaagtagcttatagaaaataactttgcttcagttttgagcagggaaaagtgtattgttctaagaaaattctgtattccataagatgagtgaatcttgatgacataaatgtttaatgagataacaagttgaagagaattcttatattataatgcagtctatataaatgtaaaaatgctacatatttttgtacctgtacatacacatcagaaaaatacatctatactcgcaggaaggatggactccaactccatgagaggggtgaggaagaagaaaggtacaggtgagctgggatgaactaagttgtattttttcctacaagtaaaacaaagcaaaacaaaataaaagcaagagtttgaagccagcctggtctacagagctagttctaggacagctagggctattgcacagagaaaccctgtcttgaaaaaccaacaacaaaaacaaaaaacaaaaagaaaatctatctgagacaaatctggaaaatgtctgcaactttaaaatctaaatttatggtcacattccagctccttcatacttctgaaatatgtaacaactaacaacttgcaaaattatgtgctgtgtacagcttcagccatgctgcttcaaacaactgagcatcgttacttttgtatcagaataatattccattgtgtctggttgccacatttcttcacccattgattgatatccaagtctttgggactcttaaaatagctgggatgatttcaacaagaatttactaagaatttatcacaggcactgaggataaaatgtggggtaacaaggtccctaccccaagcaactcaccctcaagaagggaagagggtgttaacagaccctcagtgcctcatggtagcatagtcatgttttatataatattttctaaacagaataattaaaaccatggtgatgtttttctggaagattttgaataaatataagccagataaatggccaacatatcatagttgttgaattaaaaacataatttatgggtgttggcaagatgtcttaggtaagggtgcttgctgttaagtctgatgacctaggttgggtcccagaacccacatgttaggaggaaagaacaggctcccacaattgccctccacctccacatgtgcacacacacacacacacacacacacacacaagttaaattttacttttatattttgtctttcaactaactgcaaacaaagtaatttttaaagacagtcctccaaaatatgactggctggtatcctgtgcaattcatttgagtaaccaatgcacactttggtaggcatttctttcatggtcccttccaaacccatctttgtgtttcattatgtgcatttcacggaacttagggcgttcaactttaccatgggggctgtctgattctgtgtttattatccccctcctgaaacatgtaagatcattctatgtaaaagaaacaatggttacattttcaccaaatgtgtcaaatgtgtatgggatatagtcaaggcctttggtagtggtctggatgagaaggctcatatatttgaatgctttgtcatcagggagtggcaatacttgagaaagattggggtgtgtggtcttactggaggattcatgtcaattggggtgggctttgaggtttcaaaagccaaaaccaggcccagtgacttcacttcctgctgccctgttgatctggatgtggaactctgagctgcttctccagcagcatgtctgcctgcctgctgccatgctctctgccatgatgacagtggatcaaacctttgaaactgtaagccagttttatgagttgtctgttttatgagttgatgtgatcatggtgtctcttcatagcaacagaacactgactcaagacaccttcttcactccaaatatgttcaggtccagagagaccaggaaagctagctgctgtcaagatcagtgctatctgacatccattttgtacatgtgcagcatataatggcatatccaaaaatgacaaccgtgactccagtaaaaaaaaaaaaatcaaaaacaaaaacaggacagttcattaccaagaacattaggagtcagtttggaatctgagcaatgctgagctggcagcccgtgctgagaaaacatcaatggagaatgccaaacaaatttctttttgtccacccaatttttattcaaagaaaaaccaccacgaaacttagcattccactgctggaagtaaatatacaaaaacaggaagaagaagaagaaaaagatcacgaaattgtattcatagctacccttagtggctaacagatttctaccaattgttaaaaatagtttggtaaatatttgacaactgtgtattagttaaaataagccttagtgtggttgtgtggtgatagggacaggagcaattcctggtaagcctgtgcagggggaaccaacacactctgagtcagagtgctagatgcatggtgcacctgctggcttggagcccacaccctctccagggccttattgcatttatatgttttcacacacattgattctcttagcaaccagcaaactatagttagaaaattttacttttaactaaaaccctgcctgtggaaaagatttttacctgtgtccagagcacaactttattaggaagaaacagagaccagtgaaagactcccagcccccagagggaaccacttaacagtcctcttttctctagcacacggacgagttttgacttcctctgggttatctgattatatcccaattcaaaatactcatgttgttcctaaaaggcagcttccaagtgttttctggagacttctgtgacgtaagtggcctcttcctttctgttttttctttttatctcagaagtctcccttttctttctttcttggaccatggctgccaatgacagtgacagctgtgactaacatttactgagttccttcagtgtttcagacactattgaaagcacacctctctggggtcacattaacactctggagatgatataatttttcacctccctttctcagatgagaaagctaaggcacaggtgacaattgtctgggctgggactgaaatccagacatctcgccatcttcacccagtaggctatgctggttctcatgaatctgtagttatcatcccttgtgagaatgaagaacatgggagaaacacatagcctccccatgtcttcaaagaattaagttgaatgtttgttgatgataaacaccatcatgacggagtgtatcacttggacattataagaactgattttttgtgtgttgggttagtcatgatgttgttatcgctcattccacaaataaaacacagaggctgggtagatggcttatacttaaagcagtgactcctcttgtagaggacgcaggttcaattcctagaaccacataacagctcataaccacccagaatcccagcttcaggggggttcaataccctttctggcctctggacaccacatgcatgttgttcacagacatatatgtagacagaatgcccatacatatacataaaataataaaaacattaaaaatatctattaggtgtacttggaaataaaaaaagagctcagatgaggtatagctcttagttgtctccttagcacttatttgagcaggggaaggcagacataatgaggagttcacacagggtaaaatattccataagcacatatcagcatgtaataaatatgattgtgttcaccagagatgaagctcatcagtaaattcacagacaagttaattcaaaatgtgtagtgagtcagatgtctcaagaaatataattataatctgaagctttgaaatggatatttcatctcataatgcataaagatgtatatgtcataggaacttggggatcaaactaaaccttccttgtcactgttggttcttgcttccatcatgggtctgggattttgtaatatagaagttgctgggttggtcggagtagcttttctgacactccataagcacatttggataattagctgtgttaatttgagtatggtattgatgtgtcttgtgactccctcggggaacgagagaaggttgtaactacccagaatcaacactcttgcctgctcattaccaaatcatgtccattgtcccaaagaggaaaactgcgtttgggccaatgagaagctttccattttgagtggctgcttaggaaaggtcagtgtgccctcagtatcctgaagccttcatcacttcagataccatttccctccagactgtagaaccaatatgaggatattccggactaacgtgccttttctcgggggctcctgaagcaggccgctgtagggctggctacacagcctcatcagaaacatcagtgtggtggaagggcacagggattcagcaggaacttgggagacaaactaccaaagaggcagtttcatcagtcaagcttcggcagcttctaggggaaggacttgtcctttctgagagggagatgagttcggggatctgcagagtgagtaagttggttcatgaccttgaacctggaaggaatgtttaggcacatggttctggtgacgtgctgcttctgttaatttagctcagtagggagagcttcaagtaggggaaactggtgcgttagaagaaggttggtcccatagacaacaactgctagtgtttggatctgggaatttaaaattagattaatagctatttgtatcagtctacacctaccacactcatgaaggaaagcctggctccctgatctttggggatgtagaaccttcattggaggtcttctgtccatagggagcatgtctttgcagggattgcaaaggtcatgcctgtttctgccttctgcctcccactgtgaggtgaacggtggctttggtctgcatatgttgatactacagtgtactctcactagtccaaagtaaaagagcccatcagtaatggatggaagcttccctatgctgtgagccaaaagtgcaccctacttcttcgtaagttgacttatctctggcatttgtcacaatcagcgaaggctcctgacctcatggcctaaccaggaaggtgacaatggggaaggagccaatcagagctaggtgtgaggtgacatagagtgggctgcttgccctatgacagagcagggccatatcctatccatgtttactaggaattttaggacttattgttgatttttccaaacattatagtgaggtattacttatttttgaaggttttgtgtttttcttgacaatccttcaattttaaactagagaagggaaagccttcccagtaccagccccatgtgacagcaatcaaaatgagacacttcaacccagactataactcagtgaacaaatcacattttattgtcattgtccctcgcagggcatctgaggctgtgctggcatagaagccgtggcctggtggcttcactaccatgtttaacctgtggacacttttttgttgttgttgtcggtaattgttcatctgattttactctgtttccaaattagaaaaaatttcttgtaaaaaaaattgaaaatctggcttctcagacactgggtcagtttcccttctggcagcaagcaactgaagctgactggactatttgctccgtttctgatagacgctttatttgcaaatggcacctctgtgatgctgtaggctttgagattcaggccctggttgatggctgagctcttagtcacactacttctgggatttgagtcatggaataagcatcgacttttggatttttgtacttactacatgttggctattatgcagaggaacaagatgccaaggtctctttgaatttattggagtctttcaggcactattacaggctgaattgtatttccccaaaatcaatttttttgggggggtggaataaataaaatcttagtgacagcacctttgcagcactaattaaggtgagatccttagagtggcctggacaatgccactcaaagggtacgcatgctgtgaaggaagataaggacacagtgcccaggtcacaggagtgctgtcttgaggccaagaaacaccgtggatttccagccgactgcaggagctgactttcaacagaattggccccgggagtttgtgagggagcacagccctgggacacgttgatttctgacctctggcctgcagagcgcaggccacacattttctcttgtttttagccacccacgtattttctccattagcaacaaaagccagtgtgaataaatatttaataacagtgaatctgtatggacagttgtgcaggctctgctgtaagagcatgtgttgggggcagtgggctgaacatgcttgggaagtagtggcctttgggaagagggctgttttagctgaggtctgatgggtgagttgtattctggtgagaaatggggcagcccgggccaggctggaagaactggcatgcatgagggctctcaggaaagaagtgataaaaatgcattcaaaaactggaatccagcttgtggctgaacaacagagaggagctgaagctcttggtgaaaggcctctgcagctcacagtgcgctcacagtgctctcactgcctctggctgttcaggggaaggtagttgacttttctaatacttgcctcctatggtccctctgaggatcaaattacaaatgaaggctctccaatacacctttggtagaggttcctctcctcttcccatctccctcctcacccactctcttctttcctctcccttctccttcctgtcccctcttcccctttctctgcctcctttttcattttgataaagaaggacacacctttcacaccatggacagaatgctgaaggcaccgagagagaagagggagcgtagggtttcaccaccaccacatttcacgttcaaaaggtctgtgctgttgcagtgtggagaggaggccattggtgaaaggccctgaggagaagtgactaagggtacagggatagaccctgcaggcaatcaaagtgcctgggctatattttaggaaacatagaaaatattttaggaaacctagaaaaccctggagcactttaccaaattttgaatctaatagaaagtaattgtctgtattttaggattttcttctagaggaaatacagcctggggtaatacatggagaggtaatgttacatcttctacctgtctagcttatggccttgggcaggtttcacatgtgctcattcagtcacagacacaaaaattcataaggcgaaggaagaccatgtgtggggatatcaggagctttgctttctgaaatcagtagaaggtgtcttcggggagtccctcttcacattgtctgttttcccgtgacaacctcagaggggatgttgtgctgacttcctcttcccagaccatagtcagcactaacagaaacagtcatgcccagcaaaggcaaactgctgccccggcagaggttcttggtaacaagtatgggttttacatgaagcactgcctgtgtgaaacagtcataggggcatgagagccaccagggaaaaggcacagaagtgttgtgttttgaatgggagaagtcccccataggcttggggatctggtccccagttggtggcactgtttggagaggtattggtgtggctttgctgggggaagcatgtcactgcggtgggctttgagggcttagactctatgctacctttagttcactctctctcgactcccagctgtggttgagggtggcagctctcggtttcctgcttcagctgccatgactgccacttgctactgtgtttccctgcctcactggactctagccatctggaacattaaagaaactcttccttctcaaagttacatctgctcacggtgtttcatcacagcaacagaaaggagactgagacagaagtgctgtgttgaaaatggaaaacccaagtcttctcaggtcacactctgaagctgagatgtgatggggacatgtgtggctgtctaccttcatctgccaaccattgccccgctgttggatcatacttctcaacactgctgaaaactgccccagtgctcatgcagactagacctggatgccatctcttgtctaatggttccccaagtccttgacctataatagcatttgtgtctcctggggacttgttatgggtgccagttctcgaatctcaccaaagacaaaaaggtcagaactccaggtgtgggagaagcctgtggattctagcagccctgtcaggtgactctaatcaagttgaagataccccatcctacgcattgcttacatgaaggattgtcttcttcaagttgtcatccagctcaggtctagctgacatttgatgcatgtctcttgggggcctcatctattctttccactgcagaacaaatccccgcacctgccccagctctccagagctccccatgttctcccagctgtctcccaccacaggcctttggcaagctcttctgttggggaagatctttccttacagttgttacttcctcatacatatgctcactttctcagagtctgagctttcaacgtaaaatactgccatagtgcctgtaactttctcagtgatgtgtactgaaatgtgaccggtgtgttcacttatacctaccctcttctgaccaaatcattctgaaggcagtgtgcttgctgtgtctacagaactgctcagggtgtcgcagacgtgcagcgaatcttcgaccagtatgctatattcctcctcatttctgtagaatggcgctttctagaagatacgtgacaaaatacatcaaggagttggaatttgttggtgatctaacttcatcagtagctccctttttcatgcatttaagctaatgggtaaattaccataccaaacatgtaaacgatgccagtgtttggatctagaaggtctctcgaaggctgtgcaatggcaggctaagacctcagtgtggcagtgtcaggtggtactgtgaccctgtgggtagtggggcctggagggaggtctttaggtcattggaagcctggctcaaaagaggactgtgagattcaggccgcccaggcttctctttggcttctttgtttatgtaagtgatgtggcgatggcatctctgtcttcttgatacacactgcccaggttagagtcccataaaatggaccatgtgattatactggaaccttcagaattatagaccagcaccagcctttcctctccaggtttgtcacctcaagtattccattatagtggtgtaaagacagcaatgtgaatgctgtctcaccctggctcttccatccatctcctgggagtgcagtgaacaccccctgttttgtagatcaggaaactgaccttcagaaagacgatcctattctcagttcagaagcaacagaggtccgatgcttgcagaatccttttgatgtgctcaaaaataaaataaagaagaagaatcatgctcatttcttattttttttccctcacaagggcattttgagaaggccaggataaaataaaaaggcaaaattaacatgagaatgaagttctgagttcaggctgcaagctggattgctgtatgtattctacaggaccagaaggaggctttgtgggagctcagccttggcactgtgtatttggggttttgttgtgcattagaaaaaagtgagacactaaagccctgcaacttgaggaaagcggttctctgcccttctgttacacttctgacgacgggtcgaggttaataggacactgttaataggacaacccaacctgtttcctgtttctctggtttcagtggcacacaatctggtcttccttgtatttcaaacactcttatgcatgtcctttaaagtcacttaaagggccaggggtgctgaagcagggactgtggggctgctgtggaagccaggctagagtcatccagggccttaggcgatttcatggctccttcaaactgtttgtggagatcaacttttagcatgttgggttaaatctcaatggtatggtttttcctttttgattttctttcttgtttctagagatttgtctttgttttatgtgtgtgagggtttgcttgcatggatttatgtgcactgggtttgtgcagtgcccttggaggtcaaaagagggtgttgggaatcctggaactggagttacagatggctgtgagcacctgaacgtgggtcctctcctaaaacagcaaatgctcttaacggttgagccagctccccccccccccaccgttaaccaaagcaccctgcacatgtaggatgccaatgagctgacagagaatagcaacccattgggattggcggtgatccgtaaagcctgcagatgtgggagaatggagccatgtgtacacagggtgtcgatgttcagatgtagtgagcattcatacgtgtgacagagaccagtcttctggcgaggaggcatggacagatccacagagggaagaggctccccaaggtttgggacagattagggaaagcaaagaaaggaagggagcagggagaaatggagggaaaggagagcctggagtcatttttcccaggcagcaaaatgactgtgtggggataaatgatttcaagttggagagtttgccccatccgctgtataagttgagtatccttgctctggaggctgggagggagaccaggaccatctgtgtttatcaacagttgtgaactcagcacccctcactagtcctgtgtgttgggggacatagccctcagccctcccaggaaaaaagaaaggattagccaccagactggggctctctggaaacctcacctagcatggatttcttactgaatgctgatttggagtctaagggacgcggtgaagacattttatccttggagttagctcaggattacgctagacgtgtaggtgggtgtcacccactcagaaatgaaagagacttcctggagtagatgaagttgtgcttcaagcttccagtgtgctgtagctgctctgggaatctagagggatttttggggttcaggaattgtgtgaaccaggcccctaaaatgaatcccctctgcaagcccttttgcacacaggggtattctttctatgttcagaactctactgatgttcctttactcctataaggtgggaggaggtgtgtgttgggagaaactgagagaaggccacggggcagagagaggcctgaggtagagacaatggcatgaactatgacccagaaggagggtccaagttggctcgtgagatctgactcatcttttcttttcttttcttttctttttttttttgtttaatgacttctgttacttttgagattagaagtcgagaaaaaggtgcttaaattgaagcaagatggacactttattacagttgaggaaacaggtgctgggattattctggaataaagaaaattgatgttgcagagagtcttgtaaatgatttatgaggttcatgttacagccgggactgtgtcgtctagtccatgacttcctttgtgtacctgggaaaacactggcttcgcaaagcacagtgatgagggcggaaggtggtgggcaggtgggaattcccatggcaaagtagagtgccttttggaagggcagtgaaattctccacatagagtagaagcagcatccagtatccttcccgtccttggccagttttgttccaaatcaatccttgtcgccaagagttcagtaagcaactcaggctctgtgctccaagagtctgggcagaattgctgtctaccaatctggggttcccaggggtgttggggagggggcagcgaacaagttcagcctgaggacaactgtcttctcgtcctgcagcatctgcccatacccatagcattcagcatccttggggggggggggcggcagccgggttgccctagagaaagcaatcggttttcctccattccccctcgactctggtgtcttgagtcacctttatgattcaggaaccccgggcccaaatcaagtagccctgagagctcaatgactattccctccccagtgtagcctggaagaccacgcatcctcatgcggtccccactctgagaggcacagggcaccagtgccaccttggttgtaggggcgctagtgaggaagatactcacctgtagggatctggggtctctcgcgacatccggactcaagaaggcatggcttggagctccttggaagacgcatgcatgacagctagagcagaaggtggcagtgggactctgggtgatgggtgcaggtgaggctcatgttgatcccgggcgggaggcgggccgagggcgccatggggaggacgcattggcagctggggcgacgcatagggttggggggggggttgcggggaggcgagcccgggcggggacaccgcaggggcaggaggagggagttcggaaaggagggaagaacggcgaggcgaggggagagtggagctgcggggccgggcgggccaccccgggccacacccccccttgcgggcgcccggcggggctcgggccaggcggggcgccgcacaaagacatgcggagaggggctgagcggggccgcggcacaaagacacccgggcgctcggccgcgcgggctgcagagatcaaccccgcgccgagccccagggcagcgccgagccaccggccgagcgcacccagggcccgcgcgggacccaaggcggccgcgcagtcccggtgacccaacgcgcgcggaggcggcagcgtccgagcccaacttggcctcggcctcgccctctgcccagcctgccgccgctggtgtcccctccttcccgcgatttcgtttcttctcacgctcccccacacacacccctgccgccttcagcaccgttctccccaccttgtaaaacaaagccggggaaaatgcctgcccgtgcagctcggagcgcgcagcccatcttggaataaggagtgagtacaatggcgtgttggtaaaaaaaaaaaaaagaaagaaagaaagaaaagaaaagaaaagaaagaaaaagcagagagaaagaaaagaaaaataaaagcatcaagtctgtgttaaaaaaaaaaaaaacattttgaatgctgcatgcctcatgcttgccagcgcctcgcgggagagacccggctatacggcaggaggtgagacccctgggcacccaccccggcagcgcgctctccggggagggcggcgcaggtcccacggttcctcattttcctttccatttcgtgggttggatgagatcccggcttggagacccaaccccagcccggatcctctcctgacccctgtcttcagctcttccgcgggtgcctggggtgtttgcatttgcctccctagggtgtgggtttggcgcatcttgaggcaatttctagagaggagggtcagccctggagaagagtagcccgcaggcaggttgcacggtggccttcatcgcacttgttgcccatgcgtggaggacacgtaatggtgctggggaaataaaataaaaagctcgcttctgcagccgttccggggccattggaggccagcgcaagtggcatatgggtgaggactaaagagaccaggagtgcgaagaggagaaggctgggggaggggggaggtagtgatggtgttgacggtgtctgcacagccagcttcttgtcctccctgctatcaccaaacggtggaggctgggagtccagagtgcctacatcagatccaaaaggctgctttttgctttttgtttcttttaagtatttattttgtattccatcagcttctgtcctattcagtctgccaactgtgcattatatgtttctgctaattaaatataaggtcacagcttaaaagaatttaactccttcaggaaatttatcagcctaacacacacacacacacacacacacacacacacacacacagagagagagagagagagagagagagagagagagagagagagagagagaagagaggagaataaaataccgtatctgcccccccccagtgaatcatgataatatcttggtgggatttcagactggagctgggtaaacagtggtcgtttgtaattctgaggatgagaaagcagccctagaatgaaattcagtaccctggggtgggggtggggacaagactttatgattaaagaggcgatatgggactcctctgttgtgttttagattttagattgttttatttttcagtcacattctgaggggcaggcaggggatggagagcactgaagcggctacaggtgatagcagtctttaactgtaccaagcacacttctattagattgaaaaaagaaaaagattccaaacagctgaaatgcttattctgagtggcattgcccttgccagtatagtaaaggggcttctagttggtgactttactcagaacaggtgtgtgtgggggggacgctgaacctccctagcttaggaagttgagcctgtggagtgtccatggagatagatcagctgctggtgatagggtccaggatgggagctatgtcctcatgtctgctcccatttcatcccctcaaagtgaggacttggctgcttgaggagaacctgccagctgccttcattttgcagctccccttcctctagcgcatcagatagctttgtttggcaagtgtctttttgatgggcaactggagatgtactttaggaactcacactgtgatagtccgcatttacacacagtgttaggcaggaggcgggatgggtagctgcctgtaaattgatgctcttcaccaatgtcttatccttgagtaattttggaggctatagggtgcaatcctatgagggtttgttataggtatattgaaaagtacattttagattatgttagcatttttatgaaagtaatattgaatgtatggcagtaatctggcttgatttttttaaaataagtgatgagttttaaacttatgattggtgttggtgtttaagactccattttttttgaccattctgttaacccatattagtttgctcttgcctctccaatcaaatcttctgtgatgagtgacttatctctccccccccccccgacacaagtggccatcgaatagcttttgtattttctaaaatgaaacccattaatgatgattttgaagagctgggataaataatagatggacttggagtcacctcacagtatctgggagcgctaatggagcaattagccttgtgcagagcctggccggcctaagggtctaaggtggaagccaaggtgctgggattcttctttcttttgctggagaatagagggactttgtcctgtttgggctgttgtggctcaagaattagccataacttttgtgttttgaacatgtgagtgatgccagaaccctgtgtcatagtgcgctccctttggaaaatgggttccaggtatggccgtgctcaccggtatgtcctggccaggaaaaaaaaaaaaattcctgaaccccacctatcaccagcccttcctgtaagaattttgaaaaccaaaatagcgagcattcttttttctgagtgcttacagtataaaggtctgatgtacaggaataagccatgagccttcctcgtgagcagaccttgtttagaaccatgagcccttgggagctcaggacatcttcactgacacatacataatcatgggcagagtcaaatctagaaattaatgaggaaccccctcgggcattcttttatttgttgagtttttgactacttggtctgacccctgtttttttcctgttcacctggccctccaatggcatcagagtgcagaagccccggcccctcccctgagcctacatgtggttctggaagtgattagagaaggctgctgggtgaggttcctcagctgccactagcagagtgcctgagttcggccagccctggctgacccctagagaagcagctagcctcttgcttccagactcctctagcctaacccgaattctctgttgttgtcagtggcggcccctgacttgctggatcccaagtctgccgctcagaactccaaaccgaggctatccttctccgcaaaacccaccgtgcttgcttcccgggtggagagtgacacggccattaatgttatgaaatggaagacggtctccacgattttcctggtggtcgtcctctacctgatcattggagccactgtgttcaaggcattggagcagcctcaggagatttctcagaggaccaccatcgtgatccagaaacagaccttcatagcccagcacgcctgcgtcaactccaccgagctggacgagctcatccaggtaatgaccccagatgagcggggctccatttctccctaaggggaggaaaagactagggcaccagggtggacctcatggtccccgagagcatggtggtccttcctggtgctgtcatcgttctctgcactgcctctcttctgccatcttgtatctctggtcctcttcctcactaccctcttagacttcttccttcttggttttcttttccctctcttagaactgacagggacttactcagtcgcaggcctcatgactggggagccattgcccacagagaagtattttggtttgagaaaacagtagagcctttaacttgggccatggccatcaccacttagggagactggcttgtggagtgatgctcttgagatggaccttctgcattgtgagcaaattgtcgtcagccagttcgttaatctccacagggtatagctgcgttaaacagtcatttcttgtctggatcccaactgagatcagcttaccattacacggaaaaatgaagtctttgaagaaaaagcaacagcagttttaacttgaaacagcagagcaccatcgctatggtgaagcctgttttaagtattaacccccaccccaccccaaccccaccccaatgattatgtctgatttaggtttcttagacatggccacatttgggttgtagttttctttggcacaaaacaagtcttcggtgacaaaaaaaaaaaaaaaaaaaaaaaaaaaaaaagccttcaaattctcctgcaaggggatttgctggttgttgaaaacattctcaccatgtacacatttattttcctagacagctttctttttcttgcttgctttaattcaaattggactgaaagtgatctgtgagtcatcgtttgagtgtgtttttcctcattttgtgtctgggtttttatatcatttgaatgagctgggataatagatttagagatttattatgggatttaatcccatgtttttgtaggacctttgccctagtttcatctcatgatgactacccattattcccagcctgcattggagacatagccttattcacacatgactgtcaaggctggagtcctcgctcctgaactccattggggttctgaaaccatagggcatttctgtctcttgcatttaattttcattttgttcatttttgtttcagttttcaactgacacagtcttaaactttaaaacattctttacatgctcacacgccgagttacgctgttactttgagatgatggtagatatcgctggcatgttctacatgggcagatgtcaaacatccagctaattaattctttgtctcagctacccctctgcccagcttatgcaaaatcattttcatttcattcattcctggtaccacctaagcccacccatgagacgctgcaggtcttcaaagcttcctcacttactttgcttttagaagctcagcccctgctgatgtcagtggaggctgatgggagagtggcattcaaagcctcagctctgggctcagataggggtatgtgtgggcactttaccaaatcagcttcatgaataaacaactttcccctttaagccccaaatgatctctctgggatgttgagagagttcccatccagtaggtgtgatgagactcatgggtcacccacccgcagtagcgagggccaggggaagtagcaggctattccccatcctcctctttttattggactatagctggctgttagctcaggtagccacaccctcacagctggtgcctagtgtgactggtcttggacagacaaaggaaaagagtatgcaggttgctggaggaaccaagtgtgaattggagaatgatctcactgtccgagtctacccagaactctcaaaataacatgaaggtcatggcagatggggcggtctagtggtgaaaagaattttttttttacacattatttttttttcttggaatagacagagctccaaatttgacctgcttttcccatttctgttctgcatgctccatccattttagcgttatgactaagcacagctgatgagtgtcattgccctttaaacagttttatgttccatcattttcagtgtagaagttacccgttacttgttatcctgtcttatctttataactcaatcatttcagtacatgccccctctgaatatgcatatttttgatacaaaaatataatgttcagacttcaaacagataaaggcaaataagccatggtcatttatgagaatagcatcccatccctatagttccggtgcctggtgtccctattcttattttctattactttatcacttaaagctctgtgagtgggtctactggacagtaacatcagcattacggattgggaaattagacagagcaagtccaggtgatttttcccagcaacatcaacaggagtccggtctgcagagtctggcatcagtcctaggaggctctgctgtccaggcagctttgtcttcctgtagtgtggttggcggaaagagttggacgtgggtagcagtagttcatcctgctgttggcgagaagggcgcagttagacagtaggacggtgtctgatacaatgaaactgtcctggccctcagattattaccagtcccctgactccatgctgtgtttatcagggcggggtgggggggtggaggaacagcaaggcttctgtgcttaacacgtgtgtattcgttcgattcctgtgaattccctgatgacgctttcagtcagtcaccccagcttttcaacagattggtggaggttctagacacggagtatcatggcagatgtattttctgggccagggtttgagaacggagcttctagggcacttcacttaatgtggtttcaccacagaaacacataggaaaacactcctgagctttagactcataaatgctgtcaccagacagaacgcagtgaacacccacgaagtgtgtacattgttctaacccttttacattctttagatcatatgattctcataactgtttagcctaatcatctataaataacttctgtgaaactgaggcaggagagggctaagtggtagaacattaatagaaacccaagtgggcagactcaagaacatgtaccctaacttcctgtgtttactgctttttaaaaccccttaataaatatttcttggaagtatctggtaatctgtgcattagggtgaaataaatgtgaaattatcatctccatacgcagtggtgtacattacatgtctgtgtttctagcctggtgagtgcattggctagatttcaatgttcgtcccaggcaacagatctcttatcagtgttccgtttgaatgccacagaccaatggaagcatggctccataagacacaccttaccttcagtccagttattccagtgtttgatgatttaaaatatattgcaaaatctatagcctctgcattagtaacaaagatatcttataggtgtttgttctctgatttctagctgaagtcccaccccatgaaacctaggtagggaagttatccttccctgttatgggctaaaaatttgtagatttctatgatggtatctagtgacctcagtctagatacttggtattttcacagggacagtactgaattatctttgcataattccttccttgctgtttggttcttccatgggtatttatggatgatcttcagtgggctgacttttctgctagacatttaaccaaataaaatgataggagaaaagcatggcttctcttaaggtaccccctcctacatagtcaaattgggggggtgcacgttaaatatagctatattagaaacacttgcagattggagttaggagcactcgaaattggaatactaaggaagacattaatcatttaatgatggtgggagagaagaggaaaagagaagctgcatgaggaggaagaaaggcgagcagaggagtagcaggcagacatgacctgagagaagagttatccagacacaaggcacaggcagggtcatgaggagactctggactctgcagccttggccaggccctgttactgcacagcatagaggctggtcccatcgtaggcctggcctccatccggagtggatgagccctgctgggtacttggttgtgtttgtgaaaggacacttggagctacagggtctgaatgtattaccctaagatccagctaactctggacttttaaaataagcaagcattatattttatttgttgtgctaatattacattaactgtatatcattcattcattttgcaaatgctgttttgaatccctgccatgtgaaataagctctgaaatacatggagattagagcatgaagactcttgccctctgtgagcctctgttccattgaggggtggggtgttcatccatagtgataggttccagaagattcaagcagtgaagctaggtttggggggttgttaggaaatggggatgaactgtgaataaggtcactggttaactgatatggtgatttttggatgaggaggcaaaccagtgtcagattcagactagcacttagcctactacagagtccttggctgaggcaggggaaacttccagggggccgaggggaactggggaagataatgtcgggcagagtatgggggctaccctagttccttttctgttgctgacaataggcagactggggagaatggtttgttttagcttctgattccaggttgcagtccatccctgtgggggggccacagcagcggctgaagcagctgctcacacctcatcgccaggcaagggcagaaagcaatcaggcagaatgcaattctctcagcaggctttcccacagtctggggactgtgtctgctgccttcagactggctcttctcccatcaggacagagacagtctcccctagacatgccataggctaatatgaccttgataatctgtcaccgagactgtcttttcgggtgactctctattgtatgaggttggcaattaaaactgcccatctcagggactgggccatgtccagcttcacaagttaaacacgtagagtctgtggtgtctctgcttgctctgcttgtgttccaacagtcccccgcccccagcctttgccttagcacaccttccagtcagcaggagcagaataactgtctggagacgtttgtagtagggatatcactcatgacatggtcagattctgggtatatttggaaggggagtgaggtagagattacccatggaccagttaagtgtgcaatgggcaagagaaaaccataccctgtctgacttaatccccccaaattaaaagacaatgttccttttagttcaaaccaggaagagtgtgggaattgccaggttgcggatgtagtgtcaggcaggcttcaggcttcagttattgaaggtctctgaggcaccagatcgcagtgtttataaagccacagtttttttgaggaaaacagtataatacagtatactacaatgtactacagtatagaactcaaattaaacaaacccccacactctggaggtgctggctgccagcaacagttatcctgcccccagttcctccttgagttcctgacctcacttctcttcatgatgaactataactataagctaaagtaaaccctttctttcttcttcaagttgcttttgctcatgttctttatcatggcactggatgccactttaagcacaccagtagtaattcccccatccatagtcatgcacattgtaactcatatttttaaaatggagacatggagacagtgtgtcttctatcactgaaagaggcaaactggcccctgggtcagattctccttttgacctgtcctgggattacctctcagatagtgatggtggggtatgggccaccttatgtccactgcttctggcagagaccctctaaggaccctcacagtgggaaccactttactgacatgtgtcatgtgtgtgggtacatagacaaccttgggtgtaattactaaggatctgtctaccttgtggtttgaaacagggcttctcattagcctgaaactgttcccatgtgccagcctggttgaccagtaagccctggggaatctgtcagtctcttgtgcttcaacactggaattataagcactggcaactctgtcttttttatgcatattctggtgaccaagctcaggtcatcatggcaagcaatttaccagtgagccatctcctcagttcccaaagtcatgaggtattgtaagaggtagcaaggtcataaacaccatgtatttctgagggtgtgttttagcatcgggacaaaccaaagtaggagtgtagggtttcttcaaataggaagctccctcctaggtctctgaaactttgtctttggtttcacactgcccagtgccacgtagacaggttagcagagccatcctgggtcatgtttcttgtctgaacacttaatctttgaagtgtcatcaccaaagcagtgtgtaattactaagaattagttaccttagcccatggatattgatgcagtttgacctgttacgcattcatggacagcctggagatgtgatttcacagaagggatgcatggaaaggtagggatggtgtctctacagcctccacagcactaaggactcatacattgagagccacgggctctttctcttgttaggagttatggacatgtggtgcctcccccacctcccctgctccatcctcttgccttcctcctcacctcagctgctttctaacatttaagcagctaatgtgctggtggctatttctctgttttgtgagtacacatttatcaagaaactgtgtctgtacatgcctgtgtgtgtgttgatgtgtgtctgtgagtacaagtttgtgtgtgttcctgtgtgtgtgtgtgtgtgtgtgtgtgtgtgtgtgtgtgtgagagagagagagagagagagagagagagagagagagagagagagagagagatatgtttatctatttcctgtttctggtgccttgctgaattctttgctctggcttcattgctgaatggatttaagaccaagtctggccttgtgttcctgacagtgttagattttagattctgccacaggaacttaacaattccatgagaatattgattcctatgtgactgggactgggactgggactagggggttactgtttgattcttgtaaagtgaactgcagaatttggggcaggtaaagtaacttaagatttccccgtcgttgttgggttcgagtggctcatttgtgtaagcggtagggagacaccgaacctgtggcagcacatcctggaggatgaacggcagctgacagcttctttcagttgtccaactgggaccgtctgctctaatgcatgggggtgtcagtggtcctgctagagttgcatcttgcatgtccttgtgaccttgtcctcagttattgtggtgccagttgattatttcagctgtccttcttaacgacatattctactcagttaaaatttgcctaagtgctgtttacagctgtgagtagaattccagaagaatcctaaggtagtggaggaccaagagcggctttgtttcctttttcccttctgctcccccaccccacccccactcctaccctgtgtgtggtgcatgcgtgcatgtgtgcatgtgttcatgcgtgcgtgcctgcctgcctgtgtcatggtgcatgcaagtgtggaggtccgaggacagcttgtgggagcctgtcctctccctccaccatgtgtttgcagtggtagactcaggttgtcaggcttggtgatgctgggccatctctccagcctcccttccttctcttcctgttgtctctcgagtctcacttcctgtgtcgcacatgggcattgttgaacacttgtcttcaggcagattcctgcagtctgggtctttcttctaaggtggtcaaatgattcttcaccacggtagtctgctagttttcacccgagcagggtgaaacctgctgtcatttatgtttctctttcctttggtctgtgggatttaaaaattttaatggaatgctgggcatttccctgtcttgcagactgcaggggtgcctgcagattttgatgttctcgattttaattgaaaatgtcaagaataggtgatcagacatgcccctcccctcgcacacacatttgttatctctattacatctcctgtgttgctgttttctttttctgaggctggacatgggactcagggttgcacataagccaagtgtgcagcctaccattgagccacacctttagctctctgttctcttaaccatcaagacttctttctgtcagtccgtagccacagactctcactagacacaaccactcatggggcagcaggttgtctctttatagccactcatactctgtagattgagcgctctccctgtcccaggacaccctctcttgtcatctccttggttggtggatggactttttctgtgcagaactgccaaccaccctgtgattagctaagctttatgttctaagtgtttctgctttcactgaggtttgccttaagttttctcaggaaactctgatttccttataacttattgtgctagaaggtgaacaattctagcttccagcctgtacaggtgtagactgaggccaacacttatgtcctaccaggtgaaaacgttcatagttctggtttttagggatacatccaaggaggtagaattgcctaaaagtttatatatgtataatgtatggtgtgttctctggtggcatagcagttcagagaagccacaggggagtaggtagatacttgtaactccagtagatgcctctccacatgaccaggtagggtaaagcatcttcaattctcacactgtccattttaaggttccaatatgttttcttggctactttgaacttctacagtgatgcatctgttctccctgttttgctaaaggtcttgtggaggacacagtgggattcaccaataattgctaaaacaggccatgtttcttcgggtcaggtgaaaacttctttcctgttccccttgttgaggggctggcaggagtgatttgggagcactggtgtcactgacagtaaagtgagcttgaccttccttggatgtatgtggcttcagtaccacatgctctagtggctccagggaagcagattctgagattgacaggtaaagatgaagccagctctcttctcctccacacttgtagccagaccttcaggagccacagtcctgttaactcaaaggtccccagccaagagtccgcctctggtatggtgtgtccccagcatagtggcatgtttgggatacccaaatacattttccagccccacacactaaatggataagcaaggaaaactgtagttattagatgctctagtactcctgttttttttttttttttccattggtggtaaaaaggaaggtcttgttttcctcaaaacagacagagagaagcttgagtaatgtgttcagcaatgacagcaggtgttcttaccgtagctcttcaggtggcctcaactttgttgctaggtttggagattcttggtttttttttttttttcatagaaaataaaacttgcatgtgaactgtgaggattcacatggaaatacaaaggctttggggtgcagttccgcttcctgttctactggaggccagcaatgctctcttaggacatctgtttattgcctctcagcaggttagccagtgacgctgctttcaatttctcccaacctgtgcacaagccatcatgtgcacaataagcaagaggtaagagtttgtgaccatggctaagtaaaatggtgtaggctaaagtttcaatgagtcattgctcagatagcgtttgtatgaggtggggcatgtcctgggtggcatgtcctgggtggcatcgatggccacaggtagacccttggtcttctatgagcatccttcatacaagaaagaaagggagtaatttgtaccattattttcacatctaaattatttggacatttaaaaacacattggacattctgaattctcttcgtaaacccttgttcaacaacatttttgcatgtatgtgtcatattcagacatcagattagctgtgatggagagtcaaggcaagatgtttgctgtggtcattgctcacagaaagcaagaaggatacatactcgttcatttggtcattcactcactcttcatttggggagcagtcctgagttttggcaaagtgtcttctagccacgagtataatagctcagagtcaaaacctgtgcctgtgcagctgtgatgccagggaagagctattaaaagtcaacacattaatgccctgatgcgatcatttcatggcctgacaagggccatgaatgtctgaagggagacgatgatgaaggcaggcttcatttggatagctcaccctctggaaacttctctccaaggcagaatttgagaggaaacttggctgaaaaagagtgaggtgtgtgagcagttggtggagagtgactcgggagtgaagggtggccaggctaaacctggggcatctttgtcctgttctaggacatgtacactcacactgctgatgtcttcaggccaccattgtaaccgggatggcctagcaaaggagaggagggaaggcaggccacatctctgtagactttggtaactttggcttcgctataatgacaatgggaagcaaatacagttactgtcaaaaaggaacagacacttccgttatgattattcagtgagcaagacgtagcccattgtgaattggtggaattaaactggaaatatagttagataaaatgtagtgaaagttggttttgtaaagaattttgaaggactgggcatgagaggggggcagattttaggttaaaaggagataaaaagaatttctggaagagatactgagataatggggatatttctggggaaagagtcagggagaaaggggacagctggctgaacagtttggaagttggtaggaaatgttaaatttaatatgtctaagattctttaagaacaaggcttcatcgacttcccatgggaggccttaccctttctggggagtggatgggagtggggtaggaggagatggggggtgggagaaagggagggagagtaaactgtggttggtatgtaaaatgaatgattaaaatttaaaaagaacaagataaatttttatgtgtataattactagaaaattctgctgagttctgagtggaagagtcctctccttcatttctatttcctcagactaaattacaacatctgtttgagataaaagatctagctggatttcacttttaaaatattatcgcttagatattcctataggatggattgtttctgagcttgttacatttgacatgccaccaaaaagattatctttaataggtatggatgtttgttgagcatgttccaaggtctcaccttggtgttcgtttctggaaggtgttggatcagacagtgacatttggctcttgatttgagcaggcctaaaaatccatttcatgagggtaattttaaataattttgtttaattaatgttgtaaaggctgttattttgtaataatgtcggtttttctggggcagctgttcagtgctattatgctaatcagtattttttgacaggacaggaactcagctgtactctctgagttactcaggactcctgagtcacaggcagctgttgtgtgtactcctgcaggcttgtgtgcctcttagttggcgtggtccttaccggatataatgttaaacactcctgacaagctttacaacaggaaggtaataagagctgatcttacataggagccagacctaaatgtgtgccattgagtttgaggaaatacagaatacaagcaaaaatagcaactgaatctgaaaagtggtgtgtctaacaaaaacataaagtttgccagctaactgtgttggaatacatcttcatgttagctgggtatgacttttaggggtagttttggaatttgggatctaaagtagtagttgtcttatcatctgtttcctttcagaattgagagaacgagcagtcagcattttcctgagagcacagtactggtgacaaaaatagatgccatatctctgacttgaggtttctcccaccctaaccctatcactgtcttaatcactctcttacaaatagcaccagccctctaggctcagaggtagccatcctgacacacacatttctttgaagaaagtaagtcatatattggattctccatcctaaaaggcagtgtgccctgacctctcttgcttgtcactctttgtcctgaattagtcatcgcagtctgctcaacagagttgcttactattctctagctatcactgagtgagaaaaattctcttcatatagtagtctggacaatcctgaatccagaggacagtatcagagggactatctttgttaaagctgggttaagatgggttaaagcccaacccatcaccaaatgaagctataaatagaattttaaccacaaagatttaataaattaagcatggtaaatccagcatacatcagtagagtagtgggaaaacttaagatttttttgtttgaatataaatgagtctcccatgaagttaaaagcattgctagcacagtggtgtatccttgtcattgagtgctcaggaggttaaggcaggacagtctgggctgacagtctgggctgcgtagtgaggtcagggtaacctgagatacatgctgagcccttgtgtagaaatatactacactatacacacacacacacacacacacacacacacacacacacacacacacacacacacagctacagcacttgtgtagtgtgctcaggccttgggttcagttcattcccaggactagaaggaaaatttgtatgtatttattgactgcctactttgctctaagctctgctttgtacaggacaataaaatgttcccttttcataaattattttttattatgcatattatttcataacatgattggctcagcctgcaatgtatcaatgtgttgcgaatgtacacccaaatcttcaccatagaactatagaaatattttagatggctttcctgtatatcatttaatagaggtaccatcatttttagatgattgtcctgcttagacatttaatgtgtttttaacttgtgttacagacacataatatgaaatctaacctgttaattgttgagtgtgtggttcaacattgtgggttacgtagacattgttatgtgggcattgttacgtagacattgttatgtgggcattgctccatggcagatgtctgaaatgtctcatcttgcaaggctggaactctgtacctaccaatcagcatgtcctctacttccaccatgacctcagagcctggatattaccactcagctttctcttgtgtgcatttgaccacattagatgtcccgtatatggaaactcactcaccctgtgttacatcctcaaaggtcatccatagggtagtgtgtgacaggcttttctctttgtaaagttcggtagataccgtttcatgtatgtgcctcctttcccctaatacatttattagtgggcatttgtggttcttcccacctaatgggatggttgtgaggagtgctgccatgaccatgttagtgcccacacttcttgcttctttgagattctgagttttctgaatcaacatacagaagtgaggctgctctatcatgtccttctcttttcctcagctctgtcatttatactcccacaggctcggaaaccccttatcctcaccaatacttattttctgctatttgatgaccgctttcccaagggaagaatgtggaacagtcattgtggttttgatttgggattccttgatagtgatgttgagtatgtccatttagctgggttatttctcagttggtagagtgttttcatagcatgacaaagccctaggtttgagccccggcactgtataaagaggctagcctggcccacatgtacaagagcctgtcttaaaataaaacaaacaaaacaaaacattttgttcacttgcatgtctgctctacagagctatttaattcttttgcccattaaaatcttttgccattgattttcttatctagactggttattaactatttatcaagcatatgatttgaggctgttttctttcctgctgtaaattgcttttctttctgtcagctatttccttcatgtagctagcctccccctctctctctctctctctctctctctctctctctctctctctctctgtgtgtgtgtgtgtgtgtgcttgtatgtacctgtgcatatgagtagaggctagaggaaaatctcaagtgtcctttgcttcactccattgagacagggtctctatctatacctcaatctagactggcaccagcaagcacccagagatcgcctgtctccatcccacactgcactgcagtaacaggcttgagcatagccaggcccagctttttacctgggcactttatgctgaactcgcctcctcatactttggcagcaaacattttacccattgaaccatctctccagcttctggaagcaactctttaatttgatgttgtctaacttgtccaattttgatttttgtttgggttttggggatacgtatattaaacttgtcaagattacatttcttctgggagtgttgtagctttcgggttatctctactgactggagttgccgggtgggcatagtgtaaaataagaacctgacttcattcttagcttgtggccatctggttttacaaatgctatttgttgacgagactagactgtcccttgacatccttgtcaaagatcatttaactacctaagtgtgggactgcgagaagctcaggatcctgtttcattggtccatatgtctgtctgtcagtaacatgtggtatgttttatttagaaaatgtcttttctattttctgatctccaaattctttccttccttaataacagaacatatctgggttatagagcactttaggtttacagcaaaacagaacaggaagcaaagtgtttcctccgtaccccaggtattgtgtgtatctctgttcatctccactgtcttttactaatgtgacacacctgttaactgtcgatgagcccgcatcatataaggctcattgtttatattggggctgactctggtgtacagtctgtgacctggacacatgcatggcaccatggtaatattagacagagtagggtcactgccctgaaggtcccaccacgtctggagaatcctcacctctctgtgtcccagaaaccctggaagccactgggatttgttttcattgttgttgttcagtgtgtgtgtgtgtgtgtgtgtggtgggggagggaggtcagaggttaacattcatgtccttccctatgattgtccaccttatttgttgagaaaggtctctgactgaaactagttctcaccagttggctaaactggctgactaacaaggtcctgtgatggggttgtccatgtctcctggcttttctgagcatgtctggaatctgaactcaggtccctatgctttcatgataggtctactacccattgaaccatctttccagccccagctttaaggtgttcaacatcagagataatgtaatcaataaataaagccaacctcactacttcctttctgagttggatatttctttgctttttttcccctaatttctgtagctaggatttctggtaccatttgaatacagttggcgagcataagtatgcttaccttattccttactttagcaggcaagctttacttctttttacccttgggtatattggcaaattctgccaaaagcctttgagtgttgcatccattcatccagttgatggtgtctcactgagctttgaggtttttgctttccttccttccttccttccttccttccttccttccttccttccttccttccttccttccttccttccttccatccttccttccttccttctctcccccgcccctcctttggctggataattgcatacacactgttttgagctcaccctggcacagccttgactaagtctgccatgggacatctccagtggactttctgactcaattgtaggcccttcttgtttctatagttttaaatctttttgatttcttcatttaattcatgttttcctaatctcattaaacagctttccgttggtggttttgtgcctttatcaggtggttgatatctgtttcttgagtattcatgtctggttttgtatatatcaattcattttgattgggtcatgtctctccctatttctttatgtactttgtaactttcatgatgaccccttcacacttgaaaaacagtccatgaccccaccccccacccccagagggatttgaaggtttggttcttatacaggaagactttctctattcagctagagctcctgagaccatagtggatacccttcactggacatctgtaaattattagctagaaacggacccatccccctgacccaagcatctagtctcttactccccctagtgtctgtcaggaggattacaggaggcttctggaccaacagtttcccccaggcctttggacttcttactgtgttagatgtgacagaagccagcactttggttagcccctggaaaaatcacccgtccaacacacacatgagtcccccttctctgtccccatggggcagaagggaaatggaagtttttcttgtaggtcagaaggggactaagggttgtgtttggtgggccatgacaagcaagcactgtggattttcttgcttcctttggttcatcaggtttcatggtttctcagggtgcaggagactcttacttggctcttttttccacaggaaggagtggatatgtttattgagtcccagatcagtgtgaggatgaagaagcaagtacttcctgtccctcagtcttgctggcatcaccttccttcaagtttagggttataaaggcatgagcacaaactcaggtggcaattgttgttattatagaaaccataaataagtatgtttgtgagtagaaatatatacggcaatttcaaagtattttagacatcttagaaaaatgaatctgtgatactcactgtctgtggtaactaaaatgacaggtcaggagatcagggaatttagacattctgacatagactgattgtcacagtggaccacaacctcctagggtcagttcttgaagctttgacgcttcaggtttctgggtacagagaactgaagactaagcaaggttgctaaaggtcaccaaagtcctagattctagaaaagaagagagagaaagccagtcattagcaccttacccatttagtggagtttccatttataactttggacactggagaaactgcatgctaagggatctggtaggggccacggccttgccggtgaataggccatggggaagtaactcctgaggaccacgccaaagcggagacaggtttgcgcccccatgcttctcccatacagccttagtgtctcccacttgtctcctgtgtcaccagcaggagcagacgatggttgtggggtgagagggcaagaagacaaaggctgctgaaatggttagggcaggctggtgcatccggtctctccatcagtggctttagcaaggggatttccataattctgccctgccgcagaggggactatccaccctcctgctcttgaacttggtgcccttgctgatgaggatggacagttaggcagatgggcgtgacctaagtaccctgcctgagtagaggtgtcaggcttatttgctgcactggtggctgtggggtgacactctcctgtcagcctaatgccgcctgagggatgagtttaattgcatgtttgtgtgacaactcctggacaggggatatgggcagtgctgttccagtggccatgagaaagttctgttaggtccttatctctccacaaaatagaattcttactttaaaaaatgtcttatagtagcatatgtgaattatgtataaggacaggccttttgtaactatttcatgcatgtatatagtgtctgttggtcatattcaccccccccaccaccatggcttctcctattcccttccttctgtggattctcatctcagcaaggcccccgctactatcatatcgtgtgtgtgtgtgtgtgtgtgtgtgtgtgtgtgtgtgtgtgagacacacctatgagtttcactggggttggtgtgtgtgacacacctatgagtctcactggtgtgtgtgtgtgtgtgtgtgtgtgtgtgtgacacacctatgagtttcactggggttggtgtgtgtgacacaactatgagtctcactggtgtgtgtgtgtgtgtgtgtgtgtgtgtgtgatacacctatgagtttcactggggttgcttcaactggtttagtattttccatgatgggtgagtggctggatatgtctggatagaaacaaagaaccctagatgagaatgaattgcagtgttagggtttgttgcttgtgtattatttttgctgtctctattttgtgacattgagccaggaaacataagcatatgaagagttttgaaggctccctgttctcggcagggttagcaggttgctgggaaagtcctctgcagtgtgttaagaagcagtgcctggggtctgaaagcacagagtcctggtgacagaagtgagtcagtccagggttggagacacacagacaccctcccatgacccgaaacaagatctgtcagtcagtactggagtgccttctttttttggggggggggtgttgatgactaatttggtttgtaggaattttgtcaattcaaatacagatttgctaacagatccccttgctatttgtcacgtgtgagtatacacacagctctggattttccaactctgctgtgaatttttttagttatatgctcaagaaggagaggggacaagccattgtttataggttagacaagatcactgttttgcagaaaactggatctattctgaaagtattttcccgtgatgaccttatacagctggaggccaccccttttgtgtaagcctgggtctactgcagacacgctggtaaagggcattgaaagtctagtgagtggagatcacggacttgctgctggaaaaagccactaccattttcctactttgagaagggcgcgtgtagttaactggccaagtaaagcttccttagtcacattttagattaagaattaatgcccctctttgttttcttttgagacagggtctcatgtagcccagcaagtgtggaatttactatgtagctgatgttggcctttaactgagaatcctcctgtctctatgctaagctgggttgcagacgtgtgtcactacaccgggcttagcttatttcttctcatcagtttaggagcctagactttggagccgtaatgtgtacatatatgtttgttgttgcagtaccctgtaggcagaaaatattataaaaatacattcttatttgctatcacccagtgtcattctcttgcctgccaactcctgttttgaagacagtgtctttgaagggacctcctagagcagcccgtgactgtagcttgccctgtctcctcttctagaaccctcccttccttgccgtttgagtggccagtggctgcctttcttctgcgtgttcttcagttttccattcccttcctctcattctcctctccccatcttttccttttctttggttaaccccaccacacactgacagggttgcaaggtggccatgaagatacagtttactattccatgagtattgttgatccacacagcactctggcatctggagagagtgggggagtgcacaccagggcacctctgccccatctgtgtttcacgtgtgctcttccggctccttcagctttgtgaggcaagggtctttttgtttctcgtgttttatcttctctggttacactgtgttcattgtgttgagtggctcaagttcagccttgatttatatatttccatcatttccatcaaaccctggcactcaaataccaattgcataaatgaaacaaaatatatcgggtgtaaatatattacccacagctaaattgggagatagcaacattattaaaaggggtggcatacccctggaatcccagctctccagagccagaggcagatagaactctgggagacagaggtaaacctggtctatatagtgagttccagggcagccagagctacacagtgagatcctgtctctacaaaagggcttgggactggtgaaatgactcagagattaagaccaccgtctgctcttccagaagatctgggtttgattcatagcactgcatggcaatgtacaactgtctataagtccagttgtaggggatctgatgccctattttggcctccatgggccccaggtacacatgggttgtacacaaacatacatgcaggcaaatcacttctaaatgagagtagctctgaagactttaaaatgcttgagatcacttttgtgctttgtgataacaggtaaagatggaagggctgcagatactaaaaactaaatatgtgtatgttgtaaaagccattctggtgtagagactaggagtaatttttccttccagcatttcatttctgagcaccaggcaactcaatactacctaagtgcacatgaccagagaagtcagctcaatacccagaagtgcagctgtttctggctctttgatgacacccgcccccaaccctgttgtctctaccttagattttaaagttttgtttctactaatagtaactcagcttacacttcaaagagagcaataaaaaagctgcacacctcactaggccgtaaaaatagttttgacctgcaaatgcacagtccctaaatagaggggaagagtgggaagggaagcctgagtgcacagcatccccctcccatagcaaaggctgttcttctcaggttagaagaacgaggcttcattttatatggaagggttaaatttgggtcattccttccttaaaaacccattttagaaacaaaatatagtgtgtgtgtgtgtgtgtgtgtgtgtgtgtgtgtgtgtgtgtttgagacagggtttctctgtatagctttgtagaccaggctggcctcaaactcacagagatccgcctgcctctgcctcctgagggctgggtttaaagtcatgaacaaccaccgcctggcaaaatgtgaaatatattttaattcaaattgtttctaataatgataaaaaattaaaaagttatctatattacccttattacaaaatacaccctagggaaaccttagtgtaacatttttctaatacctaaatatagtgtgatttaatcaactatgttttgtattgattgtggaacataacactggtgtttctatttcttttttaaacctatatacatacctcatttttgccagggacttgaggttggatagccagacaagtgttgggcccacaaggctatacaacttctgaaaagccaagttccatatggcgagctaccaacccacttttaccactagaagtgagattatatgtgaattagaatggaatgattgatgtcaagtcacgaacacacaatcttaacataggtaattgtcttaaatgcctgacatatgtcgatttatcagtcatatgcaaaaattggacacagtttgagtttcgagcaagaattcagtagtcagaattttccgaagataactttgctagtgagatgagatttcacttgaattagcattagaactgcagcagtgggcgtcaacctgcagtggaaagcatgttattgcagtctgtgccaatctcttctttcccatgccaatattaagttgccatcttgcacgccacaaaacttcagatattagtaactttgtgtcgtctaacccagttattgttagttgtatcaatgcaaagctcagctgtcacctcaaagggaataaaagagagcttatcctagaatcatatatgagctatcactggcaggaacccagtttcaggctcctcagataacatattctaaagtggaagtggtttcgtgatttttaaaataggtacagaacaaagaaaggccgtgggaacatcaagtacgaagtttaaagccaagcggggagatctaaagggacaggtctccgtgccgtctgaaggcttcttagcttttgggttggtgggagggagagccctgataaatgaatacattcaaaggcttttgatcagtagttgaaatgttgtgggatccaacacagaggttagcaatacattgatgttaaagggaccaaagacaccccaagataacttcactctggacctgcagcatcccagctgttcatggtcaagaactctaatcaactagtcagcctcctagaatcttttgcacagatgtagcttcatttctgggacctccagttcacagctagaatagttttaaagtgcatgttgctgtcatttaagtgtcatttaaagtgtcatgtggtgtcaagactctgtctgctcccctggtgggtcttcagggtgttgaggtttcaggagctgtcacagtcaccctacgcaggaacaccaggctttacctgaaatatcagaatccaggggcaggaccaagggacaatatcggcccgcctcctgagccttttctcagtgctgtgagggatgcgacttggggtggctttgcaagcagcaatgaaatggagccgtaggcagcccaaagtgttcctttccttttttagggtcctcaatgcaagtaaaaccagatctttggttttcacacacaggggaatcaggatgagccagtgtgaagaagagatgcagtttagtaaaaacctcttgatatatggggttgagagattgcatgctggttgagagcacttgctccttttgcagaggacccagggttagtttccagcaccacctatggtggcttataaccttctttattttcagtgccaggaggcccaggatccttctctgtttctgtggtaccggggctacacacgatacactttaatataaataggcaaaaacactcatatacataaaggataaatcttagatacaagcataccattaacagaaagagacacccaggaaagggattggacatgctcgggcatgggcgtgggctcccctcaagggagaggtacagattaagcacgttaatgtttacatctcagaggttctttcatctaagaaccccttctttcttttgatgagttgagatgtgccttgggtgggattgtcatctcataaagcaaaaccagtccccactggggattcacaggggcttctggcgagagtcctagaaattgtaggttttgatctgggcagagagacagacctcgagccttgtcgactgttctggagttcttgctgctcatgtgtcaaggggcttgaacaagactggagggtgaagggctcccttccattccctggtttctcccccctttctgttccgtctcagttttataaagtgactgtaaagcgatatgctactggccactgggggagtctcctcctcatctgtgtgtaatgaccagagaagcagcttctgtgatggagactgcctctgacatcggaggagtcacttcctgcatcatcgatatccataaataacacccaggacgagtctgtcctgcaaatttcggaagtgggtaatccaatgcggtgggtcttcattgattcagacatgccagtcagggtttgccaggctccaccagagcaaggcgcatcctgagatgggtgatgcagggcagggcctttcaaagcagtttcctgttgataagatagtaatcaacacagagactcacactggacagtgtgcagagaggagggacttgggagcactcggccctaagtggaatgtcttcaccaacctcccctcaaggctcagagatctgtgtggaagaggaggcagaaatagcggaagagccagaggtggtgggtgactccaagaaagtggtgtcttccagccacaccaggactctgagtacagactgtgatgtcatacataaggcccatacaggttcaacgcagacacaattccagcatggagaaggcagaagaggagacacgaaatcccacccttaatcaggaagttatttgcaattgtttcctgctgggaaaggggaagacacttttttccaatggagtgttaccacatatatgaaccacgctccagggctggtgcccaggggtagctgggcaacacaaatggactccatgttgttctgttgtttatgtggacttttggttttatcttgttttgttgtttcctttttgtcttattgggttttttgttttgttcatttgattttctttttttaagggagaaaaaaaaacatgaagttaggtgggtagggaggttgggaagatctgaggggtgccaggagaggggaaagaatatgattgaaatatattgtatgaaataatttcttgtactgataaacttcagagtcatctgcaatcaggctatgattgtgctggcttatagctggaggtgaagggttaggtgctcaagcctgcagcctctagctatagtgtctccatgtgactgtgtggtgccgaggaggtgtgattatttccatgctgccacaataaatcacagtggtacccaccgtcaccttctcactaagttggggacaatgcaagtgtcagttgttattctggtttccttcaaggttttcggaatagccttgttcttgtggctgcagtggccagatatggtactggaggtgtgtaacttggttccatttttaacctctaaggtagacgaggctcccccaagagcaagtggcttcagataaaagtctgtcaccgtgcatcacagagatctagcagatgaatgctcatgttcagggaaccatgtacactccagtataaacgactttaccattgttatcaatttattagaaataatatctttctgaaaaaggagcagagaccattcctgaattcttagttaagagaagtttctactgaacctgttctctgtgcatcatttgatgcaacctaagaagtagttgccatctttctacccaacaactggggcacagaccttttccattacaaaaactcaaattggggttagagagatggctcagagttggagcgtgcttacagctcttgcagaggatctgagttcttagcacccacattaagtgacacacaactgcctgtaattctggttgcaggagatccaatacctccttctggcctctgtgggcaccagcacacaaatggcatacataaactcacatgtaggcacacatacacataaataaaacttgttaaaatgtcttttaaatgtttaaaatattaacacagccccatttgtaggattttaggtgttgttctatttaaattaaatgctaatcatgatgtttacagcggggtacacctgcgacacaggcaaagcatggcaagacttggagagcattttcatttttaaatttatagtaagaccaatttaaaggccatgcattcttcaggtcttttgctggccatcccactaggggagacacgcttctgactaccaactcaccccggaatctctgggcaagctatcactttagttatatatatatatatatgtacaattagaaagagttctcctaaaggcatttattgcatgtccttttaacctaagctgagaatgcagtcacaggcccaggaatatgtgttggcaactaagagaaggcacttgtcatctgggggtgttggctaggaggcttgtagccaacatgtagacgcaagtttctgtcccacatggtcctgcagccatttagtcccaaataaacacacagaggcttatattaattataaactgtttggccaatggctcaggcttcttagaggctagctctctcttaattgttaacccatttctactaatctgcgtatcaccatgtggttttggcttataggtgatgcccaggttcctgcttccttggcagctacatgtcatctccccaacattgcctccttcctttctctatccctgtttggattttctgcctggctaaatcctgcctatcaattggctgaaagagctttattcataaaccaataagagaaacatgtattcacggcaaacccatctgctgggtttttagttcacttatgaccctctacttgagatcattgccccgtggtggctagtcacagccccaccctccccccaaacatagccaggcgctttggatgctggctatagctccacctttgtctctttgaatttaaatgatctgtggacgacatccaagagtcagactgacttcacctcatcaaaggcaacaaaaaagaagaagatgaaatgatagagaggactccaaaggccctgcaaatcaaccactgcagggattggctcgccatagtccctgggtgaagcctaaagttgctttgccttccatacctttgtggtcttgtctatgtttctacatggtgggtccttcctcattgatttgtctgataaactgacacttgttctctgagtaaatggacatgttgaagaaatgtctataaaatataaaaaaacataacttggttgcagctgtattctttctaaatattctttcctgatttctcactggaagagttttggggcagggaaagggggacaggacaacaaacatttcttgtgcctgtatctacggttctatgagctcaggaatcagtgtggcccccatggttaataacagtgaagttattttctccagaataacctgctaggaactggatcatcctcgaatgtctctgtactataatcccagaacttggggtcagggtcaggggcgtggaggtgggagaatcaaaggttcaaggccaacctcagctccatagcaaatgcagtctgggctaaagagaccctgttacaaagcaatagcagcaacaatatattcatatctatgatgtcttgatgttttaaaatatttggttttattttatgtgtttgagtgttttgtctacatctttatctgtgtaccacgtgtgtctactgctggggaggccagaagagggtgctggagtccctggtgctggagatacaaatggctgtgatgcatcacgtgggtgctgggaattgaaaccaggtcctctagaagagcagccagtgccattaacagccaagccatctgtccagtttcagtgtcttggtgtttttaagccacatagcctatgaattcactagaattcagggcatgtgaggtaattaactttttgtttgatttgtgtttagttaggatcacatatctgtactttttactttttcttttaattagaaagattattttacatgttaatctcaggttcctctccctcctctcctcccctgcctctcccaactaataccctacctatcccataccccatctcctccccagggagggtgaggtcttccgtagggggtcttcaaagcctgtcatatcctttgggatagggcctaggccaacccccttgtgtctaggctcagggagtatccctccatgtgggatgggcttccagagtccattcctatctaggaataagtactgatccactacaaggggccccatagatttctgaggtctcctcattgacacccacattcagggggtctggatcagtcccatgctggtttcccagctttcagtctggggaccaagagctcccccttgttcaggtcagctgtttctgtgggtttcaccagcctggtatggaccccaatgctcatctgtcctccttgtctgcaactggattttagttcagttcaaggattagctgtgggtgtctgcttctacttccaccagctgctggatgaaggctatacgatgtcatatgaactagtcatcaatctcattatcaggagagggcatttaaggtagcctctcctctgttgcttagattttagttggtgtcatctttgtagctctccagactttttccctagtgcctgatttctctttaaacctataatgtctccctctattatattatctcttatcttgctctcttctgttcttcccccaactcaacctccctgccccatcatgtcttcctcacccctcctgttctccccttctcattctcctagttccctctcccctccccccatgctcccaatttgctcaggagatcttgtccctttccccttctccaggggaccatgtttgtctctcttagggtcctccttgtttcctagcttctctggcagtatggattgtaggctggtaatcctttactctatgtttaaaatccacatatgagtgagtacataccatgtttgtctttttgtgactggtttacctcacttagaatggtttcttctagttccatccatttgcctttgaatttcaagattccattgtctctcccccccccattagtactccattgtgtaaatgtaccatattttctctatccattcttcagttaaggggcatctaggttgtttccaggttctggctattacaaataatgctgctatgaacatcgttgaacagatgtccttgttgtatggatgtgcttcttttgggtatatgcctaggagtggaattgctggatcttatgggagactgattcccattttcctgaggaatcgccatactgttttccaaagtggctgtacaagttggcactcccaccagcagtggaggagtattcccctttttctacatcccctccagcataaactgtcattggtgtttttgattttagccattctgacaggtgtaagatggtatctcagagttgttttgatttgcatttccctaatggctaagtatagtgggaaattaccaatacggagtcaggtagaaatacaagggtatttaatagggaaaagccttacttacagagtgacctagccagccggcgtggcagcagtctgtccagcaagtatcaaaagggaaaccgaaagagaaacacagtcccctgaaagcctcactctacatcaccctgaccacgccctcacaagcgtggtcaggcacatctgtagccagcccctaactaggcatggctacagcttcccctacagctaaggatgttgaacactttcttatgtgtctttcagggattttaatacctctattgagaattgtctatttagttctgtaccccactttttaattggattatttggagttttggagattagcttcttgagttctttgtaaatttttgagatcagccctctgtcagatgtagggttggtgaatatcttttcccaatccatgggctgtcatttttgtcttgttgattgtgtcctttgccttacaaaagcttctcagtttattaattgttgatctcagtgtctgtgctactggtattatgttcaggaagctgtctcctgtaccaattcattcaagggtacttcacactttctcttctaataagttcaatgtagctggatttttgttgaggtctttgatctatttggacttaagtttgtgcatggagatagacatggatctatctgcagtcttctacatgctagcatccagttatgtcagcaccatttgttgaagatgctttctttattcaattgtataactttagcttatttgtcaaaaatcaggtgttcataggtgtgcaggttaatatcagggttttcaactcaattccattggtatacctgtctatttttgtgccaacatcaagctgttttcaggactatagctctataatagagcttgaaatcagggatggtggtgcctcaagaagtacttttattttacagggctgtgttggctatcctgggtcatttgtttttccatataaagttgagaattgttttttcaaggtctgtgaagaattgtgctgggattttgatgggtattgcattgaacctgcagattgcttttggccagattgccatttttactatgttgatcctacctatccaagagcatgggagatccttccattttttggtatcttctttaatttctttctttaaagacatgaaattcttctggtacaggtctttcacttttttttggtttgtgttaccccaaggtattttatgttgtttgtggcaattgtaaaggttgatgtttctctgatttctttctcagcacatttatcatctatatatagtagggctactgattttttttgagtttatcttctatcctgccactgtgctgaaggtgtttatcagctgtaggagttccctgatagagttttttggtttgcttatgtagactatcatatcatctgcaaacagtgaaagcttgacttcttcctttctaatttgtatccccttgatctccttttgctgtcttattgctctagctagaacttcaaggacaatgttgaagagatatggagagagtggacagccttgtcttattcctgattttagaggaatatctttggatttctctcaatttagtttgatgttggctgttggctttttgtatattgattttattatgttcagctatgttcctgttattcctgatctctccaggacctttaacatgaagggctgttggcgtttgtcaaaggcttttgcatcatctagtgagatgatcatgtggtttttcttcttcagttggtttatatggtggattacattgacagattttcaaatgttgaaccaaccctgcatctaggggatgaagcctacttgatcatggtggatgatttttctcatatgtttttggatttggtttgccagtattttatttagtatttttgcatctatgttcatgagtgatattggtctgtagttctctttcttagttgtgtctttgtgtgacttggttaccaaggtaattgtagcctcataaaaagagtttggcaacgaaccttctgcttctattttattgaacaatttgaggaatattggtatttgctcttctttgaatttctggtagaattctgtactgaagccatctggccctgggcttttttttgggggggggggtttgggagacttttgatgactgcttctatttccttagagattatacgtctgtttaagttgctgatcttatctgttcctgattcaatttttgcaaatgatatctgtccagaaaattgtcctttaaattttcaaattttgttgagtaacggttttcaaagtatgacctgaagattctctggatttcctcagtgtctgttgttatgtcccccttttcatttctgattttgttaatttgcatgttctctctctgtcttttagttagtttggataaaggtttgtctaccttgttgattttctcagagaaccaactctttgttacattgattctttgaattgttttctttgttttgactttattgatttctgccctcagtttgattatttcctggcctctactcctccatggtgaatttgcttccatttgttctagagctttcagctgtgagatcaactttctggtgtgactgttctctagtttcttcatgtgagcacttagagctatgaactttcctcttagtgctgctttcaaagtgtcccgtaagtttgggtttattgtgtcttcattttcattgaattctagcaagtctttaatttctttttttatttcttccttgacccaggaatggtgcaattgggtgctgttcaatttccatgagttggtaggttttctgcaatttgtgttgtttttgaattctcactttaaagcatgatggtctgataagagacagggggttcattccaattcttttgtacctgttgaggtttgctatgttgttgagtatgtggtcgattttagagacggttccatgtgatgctgaaaagaaggtatattcttttgtgtttggatggaatgttctttacatgtctgttaatcccaattgggtcataacttcggttagttcctttgtctctttgttaagattctgtctggtggtcctgtccagtggtgagagtgaagtgttgaagtctcccactataactgtgtgaggtcttatttgtgatttgagtttaataatgtttcttttacgaacgttggtgcctttgtatttggggaatagatgtttagaattgagacttcttcctgatggatttttcctgtgatgaatatgaaatgactttcttcatctcttttgattgattttagtttgaagtctaatttgttaaaaattagctgccccagctgggatagctaccccagctcatttcttgggttcatttgattgtaatatcttatcccaacccttaatgtctgtctttgaaattgagatgtgtttcttgtaagcagcaaaaggatggattctgtcttcgtatccactctgttagcctgtgtctttttaaaggtggcttacgaccattaatattgagggaaattaaggtccattgagtatttattcttgtttgttttttatttgttgttggtagtggtattgtatgtggatttacactgctttttctttggggttttggtaaagtgggattatctactgcctatgttttttgtgagtgtagttaatttccttaggttggagttttccttccagtactttctatagggctggattagtggttacatattgtttaaatctggttttgtcatggaatatcttgttttctccatttatggtgattgaaagctttgctgggtatagtggtatgggtatagtatctgtgttctcttagagttggtagaatatctatcccggtccttctggctttcatagtttccatgtagaagtccagtgtaattctgataggtttgcctttatatgttacttggcctttttcctttgctgctcttaatattctttctttattctatatgtttggcattttaattattatgtgatgaggagactttcttttgtggtccactctatttggtgttctgtaggcttcttgtactttcattggcttttctttctttaggttgggaaagttttcttctatgattttgttgaatatgttttctgcacctttgagttgggtttcttcaccttcttctataccttaggtttggtttttcatggtgttctatatttcctggatattttgtgttgaggatttgttgggcttatgattttctttgcttgatgaatttattttctctagtttatcttcagcatctgagattctgtcttccatctcttgtattctgttggttatacttgcatctgcagttcctgattgtttactcagcttttctacttccagaattccctcagtttgttttttctttattgtctctatttcagttttcaggtcttgaactgtttccttcagctgttaattatatatatatatatatatatatatatatatatatatatatggcttttcttgatttcttatatcttttggtttgtattttcttccatttctctaaaggattttctcatttcctctcttagggtctctatcatctgcatgaagttgtttttaaggttgcttgttacaataaatctttccgccaaaagccacctgagccccactgctacgtgtgagctttatgccagccgcccgcccgagttaggcccaagtgaatacacagaaacttgtattaggttcaaagctgcttggccaatgactaggacttctcatctgttagctcagtcttaattatcataaatctatatattttataagacttatcttaccagacgccttattggcgtccctccttgtctgtggatcacattgtgccgctggagtaggagcagaggggaaaagagggcccttcctgtttctcctttgcttaaatatgagtctcctcgctatgtcatttcctgcctggatcagcatttctctactacatttcccagaatcctctttgactcctactcctgtctacttgctgtctcattggccaaacagtattttatttaacaatcaataagataaacatacacagtacattccccattagttgctctcttctgcttcatctatgttgggatgttcaggtcttgctggtgtagagtgttatctagactctggtggtgtcatattggttttcctgttgttggatgtgttcttatattgccgtcttcccatttcttcttccagtgggtgcaggtggtgtctcttcctttcctggtgtgtatgagtccaaggttctcttctggtgggtgcaattggctccaatattctgatgggtctcaaggtgggtgcaggtgggttttaggcacttgctctccaggtgggtgagagtgggacttgcacagagatgttagcagactctaggttgcttggttctcaggggctgagtcgatctgcctgcagaccccaggtcaggagttcccagagtgggcaagtggaagctgggccctctctactttttatacaccttctattgttactcccaatttaaatattttcaaagatgtgcttaattcagatgaggaaatggaatccccagaggaagacctgtgacaggtgccagttgtcactatgggttcaaatttgtgacaggtgccagttgccatcatgggttcagattctgaaaatgcctcccagcattggtgcaaagcatggtcatctatgtccccacccatttgtagcgtgttctaggataggctcatctgtgccactcattgtcctgctcagtgggacctttatgccttttattaagatttgtttatgaaacattttatttttggggggtatgtgcatatttgtgtgtgcaggtgctgtgaagtccagaagaggccaacagacggcatggaattagagttataggcagttgtgagccactgaacatggcttctggtaatctaaccagtggcttctgcaagagtagcaaatagtcataaccactgggtcatctctccactgggtcatctttgtttaccaaaaatattgttaaaggttttatttatgtcttttttaaaacctgctataacaaaatatttaaatgaaatttgctcaccaatattcaataaatttaatgacacaacattctatttgttgagaattttgtgtgagaaatacactgctttcattgctcttactcaactttgctgtgggaattgtgataaacagatgaaaagcaacaaagcatggctagagaaaaacatgaggtaaaaggccataatatagaagcaagcttttccccaggtagaaaacaaaattgaacaaacacaaagaaataatgagttcaagcaatggttctccaacttggtccccaggagcttcttggagctatgacatcagatcaatccttgttcattcttttaaagattgtgtgtcttgtgtaggcatgtgcctgtgagtgtaggtgcctgaggaggcagaaagggctccctggacaggagttaggggaagttgtgagtgagccacccaggtcctctgcaagagccttctgtgctcctaacccctgaaccattgctccagtccccaaaggagttttcatagtatcatgaaggtgtttttgtcttttgtgttctgctttatttgtgtccattgcagttttctggagattttgtgacgggctattcaaacagattgattgcagaagtgtgtctgtcttgtattaatacatctgtcttgtattaagccaggtattaaaaatattcataaaatcacaaagccacctctcttctcactacttattttcagtacagacaaatatttataatttaaaagtacaaaataaaaacttactggtttctccagtaagtggtgaggccacaaagtggttctgagactaaaaactttcaagcactgataaacacaaaagatgagaaatatacatttgtgtatccaacactggtaaataaatttgaatttaaaacagaaaaagtcaattcttcaaaagtaatcatatagatctctatggaatccagaacaacaccccagctgcattgcctgggataaagtcaagatttaagctgtggccttggtaggaagttcagactgctatggggctattcattttcatttttatagatttcatgtattttaaatatgtgaatgtttggattgtgtgtgctgagagtctgcaaaagaaagagagggcagagggagagagagagagagagagagagagagagagagagagagagagagagacagagagacagagagacagagagagacagagatagagacagagagagacacagagagagacacagagagagacaagacacacagagagacacagagagacagagagagagagagagagagagagagagagagagagagagagaaagagaggagaggcatacataacaccacatgagagattatatgaggcaaggtctttctctatatcctaactttgagctctcaattcccctgcctctgcttggagttatagatgtgtatcactgtgcctgaccagcatttaaaatatgttgaatctgtggtagactgattcccattttcttgaggagttgccatactgatttccaaagtggctgtacaagttggcactcccaccagcagtgaaggagtgttcctttttctccacatcctctccaggatgaactgtcattggtgtttttgattttggccattctgacaggagtaagatggtatctcagagttgttttgatttgtatttccctgaggctaaggatgttgaacacttaaatttgcataaaactacaaagagcatgatttttatttttaattttgtctgtgcttgctgctgaggatagaacccagccttagtgtatgtcacataagtgttatactatcaagctacaggcctagtctccctccctccctccctgccctcctcctctgccttcttttcttttagttttgagacaatgtcttgctaatttactcaggctagctttgaattcactctgtagctcaggcaagccttgaatttcacaaccttcctggtttagctcttggcatagccaggagtacaggcctgctgcatcagtttcaacagagaacattttagaagattgacactgaagggaaaccttcactgtctgctactaagaacacaaggttagacgagcagaattagctttctcagaactagctttacagcatgctgtgcgcatgtttgcatgtgaaacctttttcattcatgaaatggaatgaaaaacactgggatccggtattatttacaataaggaggaatatataatctgaacatttgttatcagtccagtgaagatgaagtgtttccagcattagaatgactgctaagcctttgtctgttgttgggggacagttgtaaacaaagtcttctggataatggctattttccatccagcattataaaatattaataatctttagtgtgactggtgtatttctagcaatctctcccaaggaaatattaagaaacaggagtatttatacacaaatttatttacaaaagagtattttataatacagtgtatctgtaacagcacatgcctatgtatcagactatgataaggatgggaatagcaaacagaaatgtgacaagattacttgtaagggcattattaaataagttattaattgcttagcattgatcagtatacagttatttcttggtcattaccaagttaccataattgaataagaatagaaattcagcatttaacatagtttttgaatctaactatataaaaagacattgaacattatgtgatgatacagtctgtaatgacagctagttgggagggtgagacagaaaaactgagagtttaagaccagcctgggccgcatagcaagaccatatctcaaagaaaatataatgaaaaaggctatcaggagtatcccccttaccatgttaacagtgattatgtctgtctttgggaatagtgaatgtttttatctttttatcatcgttcctcattttcttaatttttttttttacaaagaacatgccttgtaaaataaagagtatcaacatgattcagttggttttgcacacaagtattgtcgttttaatctgtttattgtgagcagctgtgaagtgaaatttgaaatccactcccagtcttggttgcttgctctctccatcggccagtgcctggagagcatcctcacctttctagagtgtgctttattttccctttgcttctaacaacaatgctactggaagcaagctgtactgtcttggccttttgctcacctagcaaatgatactcttccaaattctaaaatccaaaagataagtgacaaagctttctccaggcgcagcagaaacatgtgatctggccatttcggtgtttccctttggctgtaccttgtcttctcatgcagtccacatcatttacactgccagaggggattctcctgctgtcttccagtctgctcttggggggcatacacaaggagcctacaaatcccatgattcccatgagcacagcttatgacaatcttgggtgattctccttgaagactttattagaatctgaggaaactcaaggcacctagatctaacaggagggatctaacttactaacaggtcacatggtcattttttttctcttaccacaatctgtaagatcttttccgtagatcttttgaaatatgcttttagctcttgtagacagcccagtctttggtatgaccaacaacatctgaaatcacaaacatgttaatgaaggattatgcattatttaatgcagtctgaaatttgatattgaaatgcataaccaatctgtgctgcttactagagaaccctgatacacttaggtgttgactcaaatatgtctctaaccacaccaccggaggtgctataaatgtacgctcttaggtgctccatgccaatacattcacttgctatggaatgtaaaaatgttcatgatttaagtgatgtcacatttttcaaaataaagtgttaatccttcaacactttttaagcagaaaaatcaaagacttaaagttgatcccttttatgtaactggttgtccctggggtgggtgttgagatgtttgatgccgctgtgtgattgacatgtactgataagtttctttttaaacttgcagcaaatagtggcagcaataaatgcagggattatccccttaggaaacagctccaatcaagttagtcactgggacctcggaagctctttcttctttgctggtaccgttatcacaaccataggtaggagacaaatcactttctattttctattgtggtgtagttcatgacctgacattcatctgttcaaatttcctttatacagttggtcaaagtagtctgagatagaaaactagggtataatacatagggttttgaattaaaagtttgaactgagggaattagcaaactagcccaccagtgaattaaaagtttgaattgtgcaaactagctatcagttcagaatgtaaaactcagaggcaatatggtggagacatttgataagggacagtatattgtaatatattaagaatcaagataagtttgagatgatggtttctttatataagcagtcatccccgtgtccccctcatcccccaccacccctgcctcttgtcttcagtgtaacagacacaggattttaatctgacttcggctcgatatgtttattggacattacctatcagtcttaagcctcccttaagacacctgttgtatcaattgctcaggtattaggtttacttcagagtttgttgcttacatgttgtatcttgataatagcatagacatataaagtgttatctgtgacaccaggctggaccctggatgtcttgcctaatctcttggtttttttttttttttttttttttttttttttttttttgctataacattggaaatgttgcagtggaagcttgtgttgttttgagcttgccttatgtgtgctcagcatttctgtagcatccaaatgaaggcacacagaagtcctctctctggtattcaaaccttcagtgctgcagaactttccagaagacttctgtgcacatcctatagtgggaggcacctttaccattctagctccattaaaggaggtgtgttaaaaccatggtttttgagagtaagaaggacatggattcgtcgcagtcatgaatgcatttcaggggagataacacacatgtgagttcatctctcatgcggcaggatccctgctgatgggatggactgagactgtgaaggtttccattttatttgtttattgccatcaatgagttataataactcatgtgaaaatctcagatcagcatgttcccaaagtttttggtaagacagcatgaaagctctcgggtgaacatttacttgaaattcttcctttgttgggagtgtgtggtgcctgctgcatgtgtcgtatggtagctgatatagtctgggggtcactttccagcaagactggtacttttccatgccgatgtgccattgtcaggaggtccagagatgatgtggatgctgactcttccgtcagcagggtcaagagttgtgactgtgaaaaccgggaagaatggtaaccttgattcctaaccacaattacaggttctgtttgagacttagacattctggccatttttatggtggaaataactgcttgttgtgtaaactacttagagtctgtaagcaagggcataagaggaaagaaaaggctcacagactgagtgagaatggtttgttcctgtccaaggataactgaagttcacattacagctcactgtgactaccactaaattattttgcaagagacacagtcattatatgcccttagtgctttgctgtatataaacagtctcgtttttaaatccccaagttcagtaagtttcacagacatacttcagtgcatgaaaagaaataaactatcgttaccagctttacccccaaattatagccactaaatacagtagctagtcatatgggctacttaggaagttgcctggaagccttgtctcttacccaaacttctcaatttgtagccttaggtggctcaaatcattttgagtcacctgtctggttcttttactcccaggtctttcttattccagtgtgaaggccatttcctctgaccttggatgagttagaacagggtgaaaacactgctccctcccccaagattttgaatctgtgcaattaaaagaataaaagccactaaggttcttgaggccatgaggagtttctcagccatgtgggctgcatggtgctgcaagctgcactggtccattggaaactagaacttgaaggtttgggcaggtaacttgcagtgtcttttgtagggtgtcatggagccatgtgggctgcagatgtccacggcttttctctttcgccttatcagttcaagatgccaacatgatctgggcagcttatacattggaacagtgttcaagggaaggttaattacacagagtgccgtattaaactttaagacccaaatttaaggagtcgctttcaaattacccaccctttctaaaattggatccttctaccaccttccccaaatcctgctccacagctgaacaccctgtggtccatgatcatctctccccacccccaacaccctccttctcgcccatcagcccacagtggtggctctgcttttaaagcaaagccagcagtcactgctcacctctgtagctgctacttcattggttcagccaggctccctccatatcacttttactgaagaggcctgactcagatcctctctgtgtttccaacgcagtcgccaagaagtgccacagccccatacctgtctctgctaataggatgccaggggttcttatctgttttgtttgttcccccagaatttcccttatttctgagatgtagtagatgcttagtaattaattggggggatgtctggagagatgacttggtggttaagaacgcttgctgctcttgtaagaggattcggggctgcaaagattggacacctcgaaactcctgtcaggagatccatggccttcttctggattccacaggcaccctgcacacatgtggtgcttacaaaaccacacggacatacacactgatacacaaacaaaaaaatattttaaaggaatcttatatttgaaagcaaatagtcatatagttggtgtgagctgtggcttagtggatgttcctcaacactaaaatgatggctatgatactaaattaggggcttgttcaacatatctcatcaacagcttgcttgtttgtacatttgtttatttaatagatagtnnnnnnnnnnnnnnnnnnnnnnnnnnnnnnnnnnnnnnnnnnnnnnnnnnnnnnnnnnnnnnnnnnnnnnnnnnnnnnnnnnnnnnnnnnnnnnnnnnnnnnnnnnnnnnnnnnnnnnnnnnnnnnnnnnnnnnnnnnnnnnnnnnnnnnnnnnnnnnnnnnnnnnnnnnnnnnnnnnnnnnnnnnnnncactctttctctgctgccataaagataagagtcaaagtccttaactccgacttgcacagcaatgagtcaggtaggatggccagcagataaacccaagaggcaaacaaacagagtggtgccatgtgtataagctaagagcatttaatggaacccacagtgtactttataagatattaaggtaagtaggtggggaggtagggcaaagggtaattgcccctggatattagatgttgtctccaagattggaaaaagagttagagatatccaaggcaaacatgtgtggatgggagaattcaggtacagagagctaggggaagagatgacagtagaaatccacaggggactgtgggtcacctggaatggttgctgatgctgggagagcctcatgctgagatcctgtgacttgctaccagtggctcatattggatcattgctacttttaccaccattggtaaaagcttataggcgcttataggagcaaggacacagtcttactgtggagatgccaattacacaggaaaagcagccgtagcagtcatgtgaccaaatgtgccctacaactgggtttgcagtgtggttagaagtaggggaggaaagtgtgtggacagacctgaagacaaatgaatctaagttggacttgagctgtgaactagagctgtgttttgaagaaaacatgctgtttctccctgtgaaggggcaaggctgggcactctgtggtaggagcaagccaaaacccagacagagcatggactggtcctggcttgggggtgcataggtaaacatttgtgtagaccagaggctcatttaaggggtatcagtaaaagctgactgccggaggtaaggggaaatgcaattccatgaaaatcgatactcaagggttttgtacctattaaataagacactgattttttaaaatagtaaaatgagaagagacagtgacattaggatgcatctttcagaaagagattaagtagaaacagcccagtgaatgaaacggttaggaagttaggacagcaacccccacagccacctgagcattgcccgagatggcaggaattggtgtggaaggaagagccggagacagggtgttgagagaatcagatgagggaagcagccggtcttggtgactaacaagatgaagagaaggaagtgagaaggctgaaaatgaagagactatttagacggtagacttgtaattcatcgagagctctcgttgatcctattcagaaaaccgagtttaaaaaaaatagccaaggttttaaatgctgtgttattttaggaagcttcatttcagtacttcatccctcccgcccctctgttggattttctttctttctttattttggctattctttcattgtgctggctcagttgtgttacttcataatcattgtcttggggtcaaaaagactggccaccaatctgccacggggacattaataaccaagatgctgaatgctgcaggggagcctggtgtgcagtcacagagagaaccagagccgggagtgggaggctttcccgaagaggctgctgcaggagctctgagggggcgacacccatctcaaacctgaaggatgaaaagaagtcagctgcggaaagacaagtggaaacatgagttcagtcagagggcacagccacggtgcagatcccgagtaggatggagtctggcacgttgaaggaactcagaggagccatggagcagaccctggaggtctagaaggaggggtagcagaaggaagccgtggggagaggagggtcacagataagcaggagccaaagcacaggggctctgagggtcatggtgagggtctctgtgaagcatgcagggaaggggcactggcatgtacccccataagcatagggtgggtctaaggagataactcagtgtgaaacacttgctctgctagcatgaggacccaactcaagtcctctttagtttacagtcctgggcatcctctagggagagaagctttcttattttagggacatctgtcccttttacagagaacactcagtttgaaccaccagagtgttgaggctgagttcacctatgcagtccctatggtttgtgtggtttctgtatttttctgtatttttgaatgaaataactagagaaacgcttcagttttacaaggcttgaattgctaaagatattatgatattgatgcctggcttgctacaaaatcgcattccatcagacatcgtacttaactgacgagaaacagattatgatgagaaaaagaagaagaggaaagtgaaagaaaggtttggagtaattttaccaagcaggttctagataaaaaggaaaaagaagtgggaggaagaagagagaaaaggaggaggaaaaatatgattgggagagagagagagagagagtgttggaaaccgtaaagccctgtgctggctttcggctgatactccttttcctgtgtggagaggaacaattcccatcatcccgtgttccctgctgtgagctcaggagtctaacctgcctgtggacccgaagggcccgagcagtggtgtagaatttgccgcaaagcctccccaggagatgaggtccctgcagctctgagtgttgagtgctaacttactaatttagcacacgcatgtgcctgtggcatttcaccagtctctgagagagctgcatgctggattctgaaagcccattttaaatgaaagttaaggttctttcaggcaactttaaggtgggtcattttgcaacatttctaacttggactcactatatttttaaaaaagcatattaaagaagatgattatttaaaaaacaaaacaagaaatcctggttttgttctactgaatgcagaagtacaaattaattgttttgtgtctttgaccttgtgattcttctgctacattaaattaatgaaagtaaaactcatatcaagatgttaacatatggccaggccatgacgacccacacctttaatcccagcactcgggaggcagaggcaggtggatctcccagagttcgagaccagcctggtctacaagagctagttctaggacagcctccgaagccacagagaaaccctgcttcaaaaaaccaaaaacaaagttaacatatgttcttcatattaaaaacttgcatgcaagattatgtattatctgagaaaggaggaggagagggaggaggagaatgagaaggagaaggaaaagaggaggaggaagaagaagaaggagaaggagaaggagaaggagaaggagaaggagaaggagaagaagaagaagaagaagaagaagaagaagaagaagaagaagaagaagaagaagaagaagaagaagaagaagaagctattagagaagatgccctgtggatagagctaggtttgcagagtcccaagttatgctggatgggtgatggagctggattcctgtgactactgttacagactcctaagtggatgagctaaattagtcatgctaacttctcattgcatatgtatgcatgccaggcaagaggaggcctgcaaaggaacaccaagtaccttgtgcagcttgaaaagggatttggaagcctctgggaggtagttttcctaagcgttagcctttttctccagtcacaggagagtgcagagtggtgtagtctaggtctggtttcactacacacattccagtaagcagaaagtggccttactcatcaaaatctacactgggtatcaaggttatttgttatcagaacaaaaaccaccatattttcttttttgtaataattttgaacagtttgcagtaaggcactttcaatcttctggaaagcaatgacagtcaacttctatgaccttgaaattgtcccagaaaagggctggagagaagactcatcaattaaaggcaccagctgctcttctagaggaccaagattcaattcctagtaccaacatggtggctcacaaccatctgtaactccaattccagggcatccaacacccttttggcctcagtgggtaccaggcatgcacacagtaggtatacacatattcatggtaaacactcatacatacaaaataaaataagccataaaaaggaaaaaatatccaccaagttataaacaatgtatctttttgccctgaattagaacctcacctgtttcctctcttccccccaccccacaccctcactcctggtgctcagtgctgttagtcccagggttgaattatatagcgcttctggcaggccagcgcatagccaggcttggctccaaatgtgattaaagcaggacaggacacttaagaacactgttctttcaagtgtctcatttaataaggaaggtgtggagttatatttggtcacttttgtccatcttttttgtttgtttttttcttgaaggttttcagaataatgcggtcttactcttggaaagttggcattgctgtgtcatactttaagcatagcgagatgttgacagaagaactcacgccaggtgacacatgacactcatgcttaaccatcgtggcttatgtgcagcagctttgactcactgtagggagaaaggaattctgggaagctcttggttctaaaacacaattgggagaaatactactaatgagaacaatcgaaaactcaggtcgtcagaattatactttacctcctagccgtaagttaccctaactcccaacattcccaaaaaaaaaaaaaaaaaacagtgtccaggtttaggggatgctctatcatagctctctgaagatgctgagaaggaaagcaattgctgggttccagagatggctcagtgggtaaaagcctgccatgggagcctgaggattgagttcaagtcctttgaacccacaaaaaaaaaatctacatccagcattagtaaacacgtgtagttctagtactcctgtgagggataggagtcagcgggaggggacttctcagcctggtgtaccaaaacaacaaacaagcaaactaaaaacagagacccacattgtctcaaacaatgtggaaggcaagaactgagatctgagattgtcctttgacctctttgcacatgcctctacatccatgtatgcacaccatgcatacattacacacacacacacacacacacacacatacgagagagagagagagagagagagagagagagagagagagagagagagagagcataattgctaaaggctagcagcaacaaggtaggacaaaggacagaagggtataaaggaaagctgagcagactctctcccctgagctctcactgtgacagcacacatttgtgccctaccccatactaagcaattttccagcagacactaattaagtctagttctgatgctgtcttcttggcttagcatcagaatctacaggtgaagaactcagacccacgactacccccattggagcccagactcctatactgttggctctgaactcaggcccctccttgggttaggtctggagcttctcaccgactcagggaaacaatttacgtttctcataacatctgcagtcagacagacacagagcaagctgtttggaaagaggactgatgcctgcctagagccccgtcttccaggcacatatggaagtggaagccgctggagcttcctaagctctcctcacccatgtagttcagagatttctgcagtgttgtccttagatatgcattgtttgtgccagtttctggttccttccatcttcccagaggatgggagaaatggatcctagagcttgcccgtctgtcatgtgtcgtggcccggcatgtctcagccccaagcccagcagttggtcactgcttgagacagttggtcacattgcatccagttgagggcaaagcaaagaatgtgagccttgcttgttcatgcccaacatcgttctcctttcatctggtccagggcccagtccatgaaatggtaccattcacattcaggttgtgttttcccaattccatgggaaagataagcccttacagaccttctcaaaggccctcctcccaggtgattctagaccatgtcaagttgacaattaaaactagccaccatgctggccaaagtccacataacagaatcagattcttctggacacccctatggttcaaaaaattacaaagatctttaaaagtgttacatggaggcctaagtcaacatgtattgttataactcacattggtgtgaaaggcagggaatgagttggaatcaattaagtgggtactatgcaaaggatgggtgtttaaaaatatttattttatgtgcatgcgtgttttgcttgcatgtatgtgtgccatgtgcatgcaatgtgcacagaggccagaagagggcggcagatgccccggaactggaattacagatggttctgagccaccatgtggatgctgggaatggaaaccaggtcttctgcaagagcagccagtgctcttagctgctgatcgctccataaagccgtccctataaagagcaaatcttgtaagtgaaaacttggatgagcaacttaatgaagctatattttaacattaattgattccacaaaaagttagaaacacgaacttctaagtaataacaaccaaagaatacgttatacacattcatagactcgtctgtgcttctgtgttacttaacattaactaagttacttctaggaccaatctggtggcttttcacagcaaaagaactttgctgcttcacagtgcaggtccagcattgaaggcaggaggcctcttctcaccacccttgagacctttgcagaccatggatcgttacctccaggtccttctgctgttcctagggttaggaagagttctgatgctgggcggtggtggctcatgccttcaatcccaacatctgggagacagagacaggtgaatctttgtgagttcaaggccagtctcatgtacagagtgagttccagtccaggctccaaagctgcacagagaaacagtctcaagaaaataaataaataatgaaagaaaggaaggaaggaaggaagaaaggaaggaaggaaggaagaaaagaaagaaagggggcagaagagagagagaaagaaaagaaagggagagagaggagagcgagagagagagagagagagagagagagagagagagagagagagagagagagagagttctctggccactaggcttcacacatgtacacatgtgttattttcactcccagaacactggcatagccaagttcaagagtgtatggtgtacccagaatatacaaatatttggtgacagatccagtcctccagtctcttctttaatttcttgtaaaataaatccactaggggtgggcatggtgtagtgattcattcctttaatctcagcactcaggaagctgggacatttaggattgccatgtgccctgtatacattacaagttccacactagccagtctcaataatatcaaaatgaacaaatgataaaaaaataaatagttcctattagggaaccatgcaactgagtttttaaaaaatcatgaaagaaatagaataatattttaagtaggtaaacagccaaagtccccatgtccaaagattggacacgcccatttgagtggtatcagtgtgtcaggtattttgtctctccaactccaagattctgagtggaattctttaaacacgattagcaatgttgtgcttagaaaactagagttctactaatgtcaagccatgacattctggatttaaaatagaataagaatttgagaggggaaaaataaaatctaattgccagaaaaataagccaatatattcttttggagtaatgtaggcttatcatcataaaaaggttattatgaaaaggtgttaagttatagaaatggaaaatctcctgggccagatgatcataaatcacacattggaaactctttgtcttttttacagttctgttagttgactttcataaatgtttgtgaaggtttgaaaatgtgccatgttaattgctttttaaaattcacagaaacactaggaagcataaatcaaggcagctaagataaatgttcgcctctgtcagtacagagaggaggccatctgcgtggcagaactaactgggaagatagtgagtcatgaatggtgtgctcattttaaatgggatctttgtatttacaaatatgtagacatttccatgtgttagcctgccatagttactgccattccataaccattgacttattgatgtataatatgatggcttttgtcatttggatgcgacatgtccccagtagactaatgtggttaagtagttggttctaggctggtggtgctgttggggaaggatggggaggaagggcttagtagctggtacccacttcctgtttgctttctgcttcctgcctgaagctggttatcctataactatgccattttcccttcccaggaagattcgtgcatgtcccccacctctcttgaaccctccttgttacttattttctctgggtctaaggattgtagcatggttatcctttcttttttagctaatatctacttataagtgagtacataccatgtttgcctttctgagtctgggttgcctcactcaggatgattttttttctagttacatctgtctgcctgaatatttcgtggtgtcatcattttaacagctgagtaatactccattgtgtaaatgtaccgcattttctctatccattctttggttgagggatgtctaggttatttccagtttctggctattatagataaagcttctatgaacatagttaagcaagtgtatttgtggtagaatggagcatcctttgggtatattcctaagagtggtatagctggatcttgtaggtcaattcccacttttctgagaaactgccatattgatttccaaaatggctgtacaagttttcactcccaccagcaatggaaaagagttctcaccctacgctttcaccagcatgagctgtcacttgttctgttcctagctattctcgtttttttgcatttccctaatggctaaggatgttgaacatgttctaggtgcttcttggtcatttgagattcctctgttgagaattctctgtaccccagttttaattggattatttggtttatgtctaatttcttctcttgtgtgtagattcagttgtggtgtgtgtgtgtgtgtgtgtgtgtgtgtgtgtgtgtgtgtgcaggtgcacttttaggtgtgcatgtacatatacatgcatgctggttgaccaagtaccaagaatccttttgtttctgcctacccaatgattggattataggtatagccaaccacacccaggtattacaaggttcctgggggtggaattcacatcttccagctttcagacaagccctttgctgagccaactattcccccagtactggcattttctgaaaattcaccttttcatattctgctttacagatttccttttaatcttttactcgcttcatttatttagttatattttagaaaaaatttcttagttgtatctttgttgatctgttttgattttgatttcttacactcagtgccactggcgatttttatgcttattttctattcttagttatctcattggcttcttgaagttctctccatgtttgtttttctataattcttggaaacctttggtgtctgtgcattgattagaatttctgccatttctgttctgccctctaatttttattatcttaaaattctggttttaattctgactttcgagcatcaatttcccatctgtctctattatcattccactctatttttctttatttgttttttctcttggtggcactgggaattaatcttatgacctctcctttgctgggctggggctctaccactgagtactcagagtcctctcagttatttccgttttcattgagtttgaactccagatctataggttggtggtttattttcatctgtcgtcactctaatcatgttctgggtcctacaggatctcatcttcagggatgtgttctttgagtcattcatttaccccagtaatattaatcttgagttcatgggacagtttctagaaggttgagacataacaaaccaacacacaagatctcgtaagacactgaatactactactactactactactactactactaataataataataataataataataataataataatgataatatacagcctttgatggcaagggacaggaagtaggccaggtatagaggccaagggtaggaagaatatttgttaaattatttacttacatttgagacagtctcaccctgtaacccacattgactttaattcataatccttctgcctcagcctatagccatgctgaggggaaaatggttttaatagaatccaacacttgatgcttcttccagttttctacagcagccatttttatcttcgattgtttgtttctaagctgtgtacccagagagagatgagggtctccaaggtcttgtactctttgcagtttgaatgtgctagctggtggaatagcctgggttaattggttcctgaatggtgcacacgacagtccactgtcttctgctaagtgggaaatcctcctacattctctccctatagggagctctctttgcttttttgttttgttttggtttttgttgttgttgttgttggttttttgctcaagtccttggtgttgggatttggcgattgaagaaaataaacttagggttaaagcacttaacctaagcagcctcccccattgagggtatgttacagacagggtcagaatgcactggatgcatgttccccatgtcatgcatagactttagggctgagtgagcagtgtgcaaggaagcacagtgcagacatgagcagtctttatgctcttcccagccgccatctctccagatctttccagaaattaaggacacttgtgcacaccccaccctacctcaccccacccatgtgtgtgtgtgggggggtgtggtgtgtggtacagatgggtggtctctttcctacagtccaaactttgcgatccaggctgctcttatacactggctgtaactgagcattgatgcacttatggatgataccctcttttctgttctttgacaggtatctgggaaaacacacccaagatgtacagcaggtcaccgtgccttgttcgcaggaggtcctcagtcagtgctgagttctttccacacattttttccaaatcaaaatatttcctgagagagaatatgggtggatgtgtctcccatcatctcctaaccccaaggcttagatgacctgctctgcactctgttgggaattgaggcaaatcaaccctagacaaaaagaaattcctcaatggaaactacatcacttagatgaggcagaaccaataaaaagaataatgacacatggtcatcagtacaccaacagctattggattaatgatttgtacttttctaaagctcattgcttggtagagataaatagagtgcagacactttgaagcacacagaatccaggaggctcagaaaggtcaggaaagtcagagcagactgagagtagcctttgctgtggtttctgtaatgatatgtaatgtcgtaggggatgtctctagtgggtggtgcatgccatgttctttccttatagatagttttgctttcttcaacctctacagtcaactatcatctagaaaaaacttagatggaagcttccagatagtagatatgagttttgcacagctgttatcatagcacattgttaaaaatacttgggttttgttactagttattgttgttaatgtcttattatatataacataaaattcaactggcatagttctgtctgaatgtatcaggatctaaatctcatagcagagatgcgacttaaaggtgctataggctatctactgtacttaatctggttataggggttgccccttatggcttcagggaagtatgctttgaccttaacaaacccaactgctaccacttccagtcagtgtctgattagttaccaatatgggtgggtacctttgccatcatgaccacttccctcactgaatcattttaaggggtggcaggtgtatttgggctcacaactcctggtaagaagccttggttggtagctgtggtgcctctgtccatggtgggagattttaagtacattgatttacattttagtaaatcaggatgcagaaccaggaccagaagcaaggttcagctataaccctcaaggcctgccccagtgacttgtgtcacccagtcaaaccctatgttcccaatttctcaaaatagccctaccggctagggtcaagtatcccaacaggtgcccacaggggacatttcaacacagtgtccttgtccctctgtccttttgactgagactgatgggttgataagatcaaaattattgacctaaaataacagctgtagtgatagcagatgctcacacctggattccaagtgaaattattttaaatgtcagccatcagtacttgaaagtttgtgtctcagcttttcaagaggtgatacctaattaccaccttacttcaattttctgaagtctgactttagtgtttatgcagtgatggggttaaaactgtactggccatctcagtgatcatgttttatttaaagatttctaatttttaatgtagcatgtcccccttggctcatggtactttcttttgtggtgatagcattgtaataaggcatctcacccaagactgtacctggccatcctgtttatgagagatgccagttagtggctctatcaacatatcacttatgtttatcacttggctaatgatgggatgttctgggagctgatattgcttattaaggtttggaatggaaggtgacccctacttcacttggtagactacaagacttagtctgcaaaagaatacaaaaaagagaatgtttccttgtgtctcaaacagatttaaggaggaaaagtactgctgtcactagtttctccatcgttcccattgttattttcatcaatagtcagcatgtgctctgagtcaagacaggaactcaagcaacttcacaccacacccatcatcaagtgcagagagaaacaggtgaacccatgctgccagcttcatgccatacctagctctctttgctcttatgtcattcagggtacagcctagggatagtgctgcccacagcataggtgagaggggagagaatgcaaagggtacagggattgggttaattcacaatcaagatggtttcccaaataccccgaggctagcctgatgtagacaattccttaattgatactcttttcttagacatgattctaggatgtggtaaattacatttaaaactaaccatgctccatgggaactcttcatgcatgctgtttctgcaaggcataggatttttaaggcaacttttcagtgacaaccctcttgtaaaatagcaaagcaggggcagcttatgaaatagccaggaggccatcttgtaaaatagcaaggtaaccatcttgtgaaatagcaaggaggccatcttgtggaatagcaaggaggccatcttgtgaaatattgttccaactgtaaacatctgactcctggactaagaggaagtttgctgagtatgaagtgtgtgaacacttggacctcagttgctgctctggttttggggagatcatcaaacttttaacaggtagagtcccacaggagtaggtgggtctctgagggggtgtcactgaaggttatgtcctggcctgagtgacagcttgatctctttctgactgcagaggccatgtattcaaccacttcctacattcatgggcagaaccatgagcccctctcatggccagcccttccttgagattatgccttgtattcactcaaactgtgagccaaaataaaccttgccaggtgtttgcctatagcaataaggaaagtgaataatacagtgtgtttgttgaaagaagtaagagcccagctggttgaaaggggaagcatgctgtgcattggaagttgctgtgtgaaaggaaggcagaaagggcagaggagacttcatcacagcaatagcaaggccattagaagaagcagatgctgtaaaagactaaggaattgggggagtccagcatattcctcactgggaataatggtgtctatgttgttactggcagcagaataattacacatttggacatgctggcatgtaaagactggggatttgtactgaaagatcttggggttatttcagggctttaaaaactccagactaacaaaaaactgaggctgtgctttcactagacttaacttcttctgtgaggtggactcaaggagagaggaccaaggcaagctgtctggtaccctgcagtatgggaacaaggggtgggcggtgaagcatggatggaagggttgtgatgtaaaggggccagccatgctgcctacaaagcccctgtgcttatgacactgggggatagacgagttagatgatcctggccagtggtggctagtttggctgtgtcacagttgtgttgctgagcatgtgagggacacatagggtgttgtccagcatatgacagaatttggtgtctgtccctatgaatgtcaggttggagaagagaaagtctctatgaaagagtgatctatacaaatgtgcttgtaatggaatctatgggactttaatgaaggtcacagcagagagtgtcagccaatgaaagctatggtacttgctgttgtcacctaggatcaaaccctgaaaatcgaagggaagaagacagaataagccagctggactttttagatttttgttttcttgagaccagttctcatttagtccagactggcctcaaaattgctccgtgggtgaggaagatgttgaactcctggtccttttgcccccacctcccaaatctgtgataacaggcatgcctcaccactgccacacccagctgtagtctggttattttgaaaggagaaagtatcagtcaagaagttcagacaacagactgtatgcacagataaaacccccaagcagagtagatgttaagggccactagcatgtgaagggggtaaggaagcttcatgggacatctttccgcaagtccaccatttccatagcagttgtggcagaagggctgtgtgagaactttttgggtcaaagttctcttgaaaatactacactcagaaaggggaccaggacagaagcagaatgaagagagggtgccagtaagtcagagatggtaggccagtctctgagggatggggaatgtgtttggttacgatcagagtggtagccaaaatgtggcccttgtctatacagaacttttaattcatctggtgagaaagctcttaaagaggagatagtgagctaactctagtttggggagtgcatatagcatgatttatagagaaactgatgtttgatgtcaaacccaagtaatggttgacttagtcacaagccaggtgatgagcagtggggaagggtggttctaaggcaaagtggagaaacataaagaaccaatactgaaaatttgatttgatgacagtttttactctggtgctgtgaagatacacaggttgattatttttttctctgaagttgtagccagttgccccaggattactaatgattattcagttttcaactgatgtgtcctgcttgttttaatgatatatttgaaaattaatgagtgccatcccagcccttgttctattcttttcttttttgttccctcctagcctttgtagaccaagctgttcctccctaaagttgttgtatatgtcttcataggcatttgatgtttcttttaattttaaataagtatttttccatcttgttccatgtataagagtatgttcaaatactaaaatgctgctggttcatttcatgcttttcatatattcagctttttaccaagttttaatgatttaacaattttgaatattctttatttacaggatatttaattccacccacaactaatctgcttgtcatcttctttattacaattattccttttaatattttctgtcattgcatctgctagaacattcagcctaataaataatggttggaaagtggatatcattttccaagactttaagggaattcctcaagttatactttaatcttatatgtaatattaagtgttttgatatggatagcccttctcatgataaggcaatcattttctatttctagtttttatttatttatttatctttaggatttcacatgtgagtactggatttacatcatcaccactcctctctctccttcctccaattcctctcgtgccctatctctctcaaattattatttaacatatgtatacatatatgatgtgtatatgtatatacatacatatacctgctaagtccacttagtgttggtcatatgtgtattgtttagagctgagcacttaggattagagtctatcagaaagcttgtctctcagtaaaactgcttctccctctcttagcttctgctgactgtctgcagctctctatttgggatccacccacctcgtcatgttggcaactcagctggtggtgtcatcctgcaggccttgtttagttaccatattgctgagatttcatgtgtgtaaagttccctgtcatgtcatcccctgcgacatggtaagacactgttctctggcccttacagtctttccaccctgtcttccgtgattttccctgcgccttaggtacaggtagactgtagaggtgtcagttgttctctggattttgaccagttgtgcatctcttcaggagtctctgtccactgcaaaggaagcttttctgatgagtgttgagagctacaatttccaggctggggacagggcacgagctctagtttttgtagaaatttaaggactactacacagcattgcttggtatcttcttgatctatgagctaccttgcctttttttcctttgtaactatcctgaaatgctctaaataagaaggcatttctgaggagagcaatggtaggcaggtggctttcccagtctcaacagtaccttctgccatttctgttattgctgttgaatgagacacgggcaagaatgggaatggcccttgccggctttatgcatagccactgtcacccatgttcattcactagttgatggttaggacagctgctcatgcttctagatacttggggtctgtttctgaggtctctgttatgtcttcttaccttctgtttccatgattaatttgctgttcaggactgcatcatataaattctactgcttcttaatcactaatagttaggtcctggtactatgtaggaggaatctttctacctcacacattttgtttttcaggtatttcttagctattcttgtacttttaagttctaaaatgactcctgcacttattgtaactacatcatattttcccatttgcagacatcgatggaacctgatacttgaacatttgtttgagtgtattggagttcgaacacagtgattgacagtgaagaaatacaaaacacaatttcctctctgcttacaagttagcgtgtttcagagattaaagtaaacatggacctaaacgttccacctatttaagtatggggagttttctcatgtgcagatggacacccttgattttcagtgtaacaagtcttcattgatttgtccatctttattaaggctttaaagaagaatgtggagtcagcaaggcctggcacattaagttgaagcaggaccaagcccctcccccatgcatcaagactgagcaaggcattccactatagggaatgggctccaaaaagccagctcatgcaccaggcatgtggttggtatgtaaaatgaataaaagatttaaaattaaaaaaagaagaatgtgaagggtttatgtagtttgctgatttttaaaaaataattcagaaatgttcagagtagcattttctttatctttgtgtcttcagtgcataccattataatgggagttccccagaactgggaatctctgtagatcatcccagtaagacagttaaagttgaaggaccatgaaaagcagggagggtggtgttaatgaccacatcttggagctaggatgagataaagggtccagtgaccgcccccccatctttagagttctgatgggggctttatatttatatagaggaaggcttgatcaaggagcaagagatatgcagcctggtgaagctgtggtctgggttatcacaatctagtctctgcttctaaatggtgaggagaaaacctttacgcctgttactgcctgcctgaggggtatctgttttgagtgcgaaagttagtgtggtctaatcattttggttaactgtttccagtgaggctctgctgttcctggagtccaagggggctgggatgagagaagtcaagacagcgtgctcatagtcttgtgtgatttcattattaatacttgatgattgtatccatccgattgttcagtgtgtcgtgtgacttaagggcattttctgtttctttgcatgtgtgaaaatgtgtgtgtttgtgtgcatacccacgagcacgtgaaggtggcagaggagggtgtcaggtgtccctctctaccattccctacctcattccctggagacagtgtctcttaaggaatctggcctgggcaggcagtcagctagccctggagttcctcctgtctccactgcccacagcactgggcactcatgtccagatttctgcatgagtgctaaggattttaacttctgtcctcaccctggtgtagcaagcataagcatctgctgagtcatcccacagtcccggcacaatttatttctcagtagctactcactgcttcactacaagcagtgagcattgattactgctaaatgcgttgttaaaccctgagttcatgctcatgctggagttattttcagcttctttactggtttcattcattaattccccatacggtcttaattatcaaagctatagatagcattcctttttaatttgaaagcaaattttatctccctttggtctttaaaatatttattgataattgctttttattccaataagccagaaaatgccatcattaaattataaaatgttttaaaaccaaagcatttttactagaaagtaagttcattaattacccagggagtttactcattatttttacttggtgtttctttatacatattcctttctttcttaaataatagtctcattatttgaaaatttcccacaatgtattttgatcatattaatatcctccttaaccttctccaaggtacccccacctccctccccacccacggtcatgccagcacacatggcatcactcttttcctttaatcccacccagtctaatttgtgttggcccaaactcctggctgtgaggcctgatttgtattgcgattgatataccaggagccacaccgctaaggaagacggagctaccctctgctagcagcaacccaatgctgatagctcctaaactaaggctggagctttgtgcccacttctcctgcttcagctccacgccgggactttgtctgggttgaacttgtgcaggtccttcccatgctgtcacaagccctgggagtccatatgtgcatctgcacctttgtgtccagaaagacatcgtctccctcaactcatccaccacatctggctcttgcaattttctgcctcctcttctatgtggatcctgggtatgatccagatgtcccatttagggctgagaactctgaagtctcttatgctttgtaagctgaccacttgtgggtctctgggttaattgtcacctactttaagaagatgattccctgatgatagctaagtggtacactgagctatggttatggtagtgtctcatgctctgtccatttaaccgaacaacagcagtagaatcttcactatggcctataacttatctagccacaggttcttgccctcattgacagtttcaggtatcagttccatatcctggggctggatttaaatccaataaaaaacatggttggctactcccataaaatttatggcactattgaaccagtggacttgtctttctaggcaggttattattgaagcttgtgagagtcatacttgactaaggttgataattagccagaagtgtacataacgtcttccaaaactataaaacctagacattaggggtgaagctttgtggtcatagattgtttatgatctaataaagcttgcctggagatcagaatgcaaagctagccacagccatagaagctgggtagtggtggcacacacctttaatcccaggactcaggagacagaggcagatggatctctgtgagttcaaggccagcctgggctatgtgagagtgaaccaatctttagataaacagagctcacacctttaaccccggcactagagagaatataaggggctcagtgcagtctcaggagccgtctgagatttggtgaggagcagggcagtctgaagattcaatctgaggttcagtggatcgaccctttggtctgagcattggtaaaggtgagaactctctggaactttggcccctttgcttctctgatcttctgcttgaaccccaatatctgcctctgggtttttatcactcctactacaaagcttccaagtgaatatcatttttctatctctatgctctgtcaatcaagtatgtgatgtcttcagcagcagggttttaccattgagtttggggataatcaatagcattggcaatatctttttgtgtttgagggtctacacgaccctgttggctagcaactcaaaaagagaactaattcctggtactgtgcttttatttggtagtgagtggtgtctagttgaattattgtaccctggcccctttactgggtaactccatttaagctcatgcatgttttaggaagttttaacagtagtaggtttcagtagggctccttcaaaaggcttttggtgatagttgtccctctgcatagtctcccctcctctgccctcacagtttcattttcctcctttcaccatttctgacattgtaattctattcccccttccttgaaacacagggacatccagtctcttctcttctcttctcttctcttctcttctcttctcttctcttctcttctcttctcttctcttctcctcttcactcctttgtgtttccaacttcatgtctcagtttcttttcctgctgctgtaataaaaccctggcaagaaatgttcatcgtggttcacagttaaaggcacagtcagtctatcatggtgacagagtcaaggcagccggagcctgaagcagctggttacatggcgcccacagtaggagagccaggggatgagtggacgttgctgtcagtcttgtccccttccatcttatacaacccagcatcctttgcccggggaatgggtccacccacaattaagatgccacaacccacatcaatcatcataaaataatccccccccacgcatgcccagatgcctacgtctccagtgagcctagagtcaaggtgacagctaatgatgcccaacataggtctttactctttttctaacatatgagattgtgcatttatgggtcaactggtgagctggttttcagttatgtcccagttgagccaatggccctctagtaagggtttgaagctgtagttctccccctctttctcactcattcccttctccttctattcctccatcaatccatctcctcctctctgtgataattgagtctatagttttattaaataggaagtcagatgatagaagatggactgatgctgcgaatagataattatatgattacattcctgcagtgctggaagggggttatttatttttagtacaaatcacttctgatgagaaaaaatggccaagcctttgggattgcttgccaagggcagcacccatggacctgatactaggcaatcaagctgaagtggtttatcggtgggccctgctccaaaatgtgacatgaagaagacagacagctgtgataaactccaaggtgactgacaggtagcttggcttccatccactcctgcatcagatgatccacaagtccactgaatgttactgtgtctattcagggctgggatggcaccctggtttcatataggttgctgtgataaaagacccatataaaagtagtttgggggagaagaggttaaatttatctcacagtttctagttacagtccatcatcatagggacttgagactgtcctaacacgtcagtagagagtggagcacagagaagtgaatgtctgcattcctgctgctccccctctccacacttaactcgtccaggatgtgagcccagagaacagtgctgccctcagtgggttgggtcttcccaccccatttagccatatgaagacacatccccacagagatagccactttaaaaaagggggggttctcagtaagtaagaccgtctttttcaggtgattcaagattgtatcaggttgacagatgtaaatagtacctgccagagaaagggaaaaagatgtaagttacagtgtttgccaacttctacgatgaaaatattcccatgagagatggtttcaagctgttaaggtgaattgaacagacttgggaaattcctaaaaattcaacagttctcattctaagcacccttcagtgtaccccggaacccatgttccccacccttccaaggtcctatgccaccaccttcaagagcttgactcatctgcagtcctcattttatgatcattttgaggctgtcttctttgtcagtcttgttagccaagtctaagccatgcctaaaacttgatttcctcaaggggacactgagtatgaactcattttaaggtgaaaaggtaggagacaactgagaatgactgagacatgttgatcaaatgcagtgtgtgctctcgagttgaccttagcactgggacaatgtggtaaagaatgttaataagacaactgatgaaatctcagtggagactgtataaatttagtgagaatcccttgtctatgttcatttacccaagcttgaaaattgtgctgtagttatttaagagagtatcatcttttttttttaatgaaaggaaagaacaaagaatacagggataaatgggctggcgatgtagcccagttggtggagtccttacttagcctatgtgaagctctgggtttgatcccagtgttgcataaacagtactcacagaggcagggggatcaaatcagtgccctctggggctctctagtcagtttgaagccagcttgggatacaggagatctcatgtcaaagaacaacaaaatccaaacaaacagaaatggtgtcagtagcttgttatacaaggggtgggggtgggggcgcaaagtaggaatggttgacagatacagaaaatgtttcattctgtgtgggatcctatgcctttcccatgactctaaaattatttgcaaatcaaaagtagaagaagaaggaagaggagaagagggaagggggatgggcgggaaggaaggatgggatagaagggaagcccagaaagaaagaaggggggtaaaataggctgtggaacagtctggatttggcttctcgtggcactctgccattgaaataccctttgtgatatctcttgtgagaaattctttataaatccttggcactcctgagtggttatctcaacccttggcactcctgggtggttatctccttaagccctttgggggtgatctggtgatgtttcttactttcttcctttgagactggcttctcctgtcaaagccagactctgattgtcccctcatacatgtctattgttgatgttctgtgaagttttggccttgatttatcttctttagagttatacttttttgttgttttttcaggttatttaatctgcctcataatctataccagttcagggttctgtctctgtctcctgagtttcaggcttatgaatgtgacgtacagtgtccactttggttattagactagagactggaaatcatctgggtccatagtgtcatcatcttgctgtcacctctgtgttactataacaaaaggtgggagagaactgactttaaagagaaatgctttgctgtgtctgtggttctggaggtcacagtgcaagattgcctctgctgtgtgtgaaagaagaaactggtgggaagagaggtggcggagcaaatgccgttacattgtggtgcaggacacaaggaaggggttgggtagctcagtctcctctaatggcaaactcccaatgatgtaaatatctctcgccaggatccactgtgcctgtcaatttgacataatccagaatccctggagatgtgcctctaggtgtgcctgtgggagattatcttgattacactggtgaggcaggaagacccaccctctgtgataggattgctccctgaattggataggatctgggactctgtaaatggagaaggcagctgagcagtggccattgctgtcttcttgatcatggatatgatgtcaccagctgcttcaagttccaaatgccttgacttccctgccacaaagattacccttgaagtgtgagctaaagtagactcttgcgtcgattgcttttgcctgggtgttttgtcacagaatcatgccttttaagtttctaccaatccctaatagccccatgctggtgaccaagtattcagcacacagagcttggagggacactcaccaagaaagcatttaccttctttggccctacgtgtggtgtccccaggcctagtcacatttcagttcatttgtctccaagaagcattctcaagatcaccagttatccaggccagaatcctagcctaacactttcccttttccctccttgtgaacatgcttgttttggaagctaaaatgacattggtgtttccaaggtggatcccgtcactgcagactgtggaaagccttaacagcagctccttcaactcaaacctgttggcatggagagagcttttgtagtgtggcccttgtttaccttcttcctgtgtctactggaaactgacacacattcctcatcattcagccatctctttttagtttctcagagatgacagatttctttctctatcccccaacccctgacattctctatctttggttcttcaaccttatcatgaacacccttctttctgaaccctgagtaacttctactcagtttctgactaccactttggggtcatttgtgtgtggcttctcccattcttctacacccatgggtaccaagaacatcctctggaccctgtgacacctccacacctgtgcacatcagtgccgtgccctcccacccccttgcttattagcactgagagataagaccagcttgctttattgctacactcttagtacttatcactgagcatggctaatagcaggtgctcagtagctgcttcccaaagaacgagagtagggaaccttgtcctcattccagctgctgaacacagcatgcagttggtttagctccacctcttgtggccagcttttcttccttggctgcatgtgcctttgtgtgacttccacctgctacttggttctttgctttgaagaacccaggtaggtccagttcttttccgtgttgtgatcatagctgaaattccatagtgggcctgcctgtattgcaggtctccttcccttcattgtaaacaccccagtcttccaaccattccatgtgaagagttgccttttgcagtgcgtactgtttctgtaatgatcgttgtgaagaatggcacccatgggtggtcagagaattccagaacatggtgaagaccgtcatgtgatggcaatggcatttgcctgattattattttatacactgatagacaaggtaccttgattgtgccatctttgcttctatcagtactgtaactagtaataactgcagctgttttcaccctgcctgaggtgtgctgagcatcatagtataaagaactttcctaacaccttcatgtggtactcttctcagtccttacacctcgaggaaatgtacaataacagcataccctcctaacagccaaggaagtaatctaggcaaggtcccaggtttgccaagtggctgtcatgttttgacaaaccaccaagttcttcaatcctatgacatcccaattcttgacaacatctagcagttcgtagttacctcactgcttctcagttcccagcacctgctgtgggggccgctacacagaactcttctgaaaccttgtattcctagctttcttctgatgaaaaggcaggagagacttctgtagatgttccccttagtggttccatagaatttcaatagatcaaaacacaaacaaaaaacaaacccagccacaatctttgtaacacaggtagagagtagcagtaacaggggagcagatcccaatataccacctgtttatatttttgagtgagagaaactttgaacaaaagctctaggttaatacaccatggaggagagagaagggattctctatcctggatatgttcctgtgcttctgggctgtgggtaattcactccgaacaggtggaggtggttaactccaggggttctgaagtcagagaggtgcagctgccagggtcgtgaccagtgcatatctttgaaacttaacattcttcagaactttggctattttgcatttatattttttgggggaatgtaattgagtaaaaagacataaatttcaacacagctttatttattctttagataatttaaacatttttgggtattctcaatgtatctttccaagtacattataaatggtaatgaaagttttgtgagtgaatagcattatcagtgcctgggagacagagtagagagatgaaaaatagtgcattaacatctcatttttcatcatccgatcaaagtttcatcaaaacattagctttatgttataattttggaataattgcttataatagcttttaattctacagttataatataaagggagtcttcttcagttgaaataaacaatccatgtcttgcaataaatagctggtgatttctcattaaacttgggatgggtgtttcaaactatgactcatttgtgaacaaccgaatttttccatttttgtttttcaggatttggaaacatctccccacgaactgaaggtggaaaaatattctgtatcatctatgccttgctgggaattcccctctttggctttctgttggctggggttggcgatcagcttgggaccatatttggaaaaggaattgccaaagtggaagacacatttattgtgggtaccacaagcttcttactatatctatttactttttttttaatgcattatctcttctagcactttagaagaggtggaaattcagttgtcatttacataacaaattctacgcctcgcagaatgccacccactgtatttgatttatttgcacacttgactgagagaaactaaaaattatgtgcaagaaagaagaaatacaaccttcctgggttgcacttgaagttgtatggtatcctaattatattctctctctctctctctctctctctctctctctctctctctctctctctctctctctctctgtgtgtgtgtgtgtgtgtgtgtgtacatgtatgtgtctgtagaagggtaaccttaggtgtcaccaaaagtaccatttaatttgttgctttatacaaggtctttaaatgacccatattctcactggctgattggccagtgagctcccctggacctgtctgtctttgcctctccaggacccagattacaagcatttaccaccacacctgcctttgggttgtgggttctgtgggtggaacagatgtcctcatgcttgtaaagcaaataatttacataactatgctatcaccccaggctccacctatattctttaaagtagttaatttttcttcaattctctgttttattcattttatgtgaatgagtgttttgcccacatccatgtctctgatcaatgtacatgcttagtggccatggaggtcaggagagagggtatcagatctcctggaaatagatttacagatggttgtgagctactgtgtggatgctgggaactgaacacagctactctgcaagagaaatgagtgctcttaactgctgagacccctctccagccccaaacctttattttcttatttgagcaccatacacaattcctttacattgttctaagcagtagatgcttagagaaacttagctctggaagcaaatagctggcagtatttttattttgaataattgctttggtatctgtcttgattactgttggcattgatctgttatgtggtccttttgggcagattgtaataataaatagcaaacacaaaatacctcgatgataggactcagtcaaacaaaactaacctacaatgtgcagcagttccaaagaacccaagatagtaaacatgagggtgttgggattggttatatttaggaggtatgtggataaaattaggatgctgctattgaaaccaagggaggggagagtcgcttgtgcatgcctttaattccagctctcagctcttggggggcagaagcagggttcaaggccagtgtgatctacagatcgatttccaggacaggcagggctatataaagaaaaaccaaaggaaaaatgctattattggattttaagtgaaaaataagaatctatgattgtaagttgtgtccttgaggaaagtcatgggaggataaaatggttgcgtttatatgtggtgttacacgtggtactgcaaagcattgcaatcatcattcagttattttttatcatttcatataatcgtcaatgaaacaacgcattcatggttccaccagtgaaataaaactattgactcaccgtttcgattttagcattagagattttttcctgctgaagacagaagctcactcttgaacatttttatggtggggtagacgagaggattccttcaaaatagggctttcccttgccgtctacgtgatagactctggctatttacactccccagggaggcaaactcattgcgtcaagttggtaataatgaattgttcattcctacattgagtaaaagtctgactgcccatcccagccttcactgtctttgctacaccgtgtacctgctggtcatttataaacctttacaccttcacgtcggcgccattcccattgtcatgatgtttgatgtcaagcattttggaagaactttcaagatacgaatttactcaagtgtcacacatgagttgaagatgggagatgagagagttccctgtggtcatttccattctgtgattttatgcatgtttatctcgagaaagatctcagcctattattaaatggtttcccttttttaaaaaattaaattaagcttagtgtgtgtgtgtgtgtgtgtgtgtgtgtgtgtgtgtacactatgttgctcatgtagaggtcagagaacaatttgcaggagttggttctccatccaccatgtgggttctgggcttgaactcaagtgttttggcttggtggcaaacacctttaccttttgagccagctcatcacccccattcagttgtattcagggggtatggactataatctacagctgttgcagtgcataaaacagtcagtcagtcaatgaaaatgcatggcaactatgtcagcactggaacaaatacctgcaatcccagctctctagaggctgagtcaggagctccaggcaagtctggattacaccatagggacattttgctttacaaaaaaatgacaaggaagtgactaatctcaaaaagagagctggagacaaaccctattccacacttcacattatagggatttctcactgaagaagcaggaaaaaaaaaaaaacttaagcatggtgagaggcgggtgtggtcagagctttgaagtcgaacccttgcttgcagacccaatggcttcgtagtcccacaggcagcttgactcacctgggtctcaaaggccgacttccctagtatcatatcctagtcaactgaatggatgtcattgtccgtgtttcccagttcccagctgtgaatgtatagtgcttgcccaggtttctcagctgtcacatttctctcaattgtacctggcccacagttcactgtgtgcccacagcatacacagatttcattagtggttcaggtggactgactgttgatgcctatcaaaagctacagcctcccagcaaatgagaaatgcactacaattttgagaaaacatgttacccttggcaaatctatgaatgtgtgaaatagcgttatttattgacacgggctgctgtgaattgcttctattgtactccatcctaatgagtgagcacagtggaagaggaaggatggaaggacaggaagcaatgtgctcgcgtggtggcacttggtctcgtggcgtgtcagtgacctgcgtctaccccgccactctgtcttcacagaaatggaacgttagtcagaccaagatccgcgtcatttccaccatcatcttcatcctgtttggctgcgtcctctttgtggcccttcccgcggtcatcttcaagcacatagaaggctggagtgctctggacgctatctactttgtggtgatcactctgacaaccatcggatttggtgactacgtggcaggtaaggttttcctgtgttgcgactgctctcccagccagagtctattagttaaggctcacatgaacttattggaacacaaggctgtctgagactggactgctgtgcccaaggctcacagctaggtggctgtaaagagagggagctcttggatccctctgagactcttccttgccccttgctcgtcacagggggcagttgccagggctcccgtgatctttgcttctccgcagactcattcccacctcagtcttggttatatgaggcatctgccttgcatgtgttttcaggtacaaactttactcttcctctaaggactacctgagtgaaggacccagcctgcttccctatggtgtgtgtgtgtgtgtgtgtgtgtgtgtgtgtgtgtgtacaaacacactgtatggaggtcagaggacaaattgtgggagttggctctccatgagctcttgtgattgaatgcagttgccaggtttgtgtggcaggcacctttgctggccgagccatctttttgtcctgaccccattctcttgtttaaatacttccaggggagagcctctattgctctgttcagtaaggtgtcacaaagggctggaggtcattgatttgtgctggggctaaggttgaagctggcaaagcccccgtgtgaggagcctgggagaagtgtgtcattctcagggctctccctttgccagaagcaccacgacactccttgtaccgagtagaggaactgggggcagggacacagagacagtgcagaggtctaaggggtacctttgaggtagacagttatcaaaatgacgtgagaagcctctgacatttgcagctccaagtgagcagatggggctctgtcctgaaatgtccattttcctacctcccgagaaattgaaggagtcagtgtaacagaactgagaaatgtgttcctacagggaaggtgaagtagcatgatgaaaacaaagacacacttgccattcattattttacctagttacataaacagttacaaagtcttgtgaaatgtgttggttgtatgggtgttaggtgataagtcttacactttaggccaacaaccggacctgggatgcggcattttaaataacccacagactgtgtcacactggcttgtggccttcatggtctgactctttaaaaatatgaaatttatacgtgaagaaaaaatgtgggcggaatcttaaaataatagtttctgtgaccactaccgagatcctggcttggagtgggtaaaactccaaatattttactttatggttttggaaaacatgtttttaaaaaagacttactttaaattcacctgaagaggccaatgctcttaaactgaagagatcctttaggtctgactgtggctgttgtcccctgtccaaggaagggtattcggtgggaatgtcctgtaggtcccagtgaggtcccagagtccagaggagtcatggtcccgtgtcatagaagggtagggtgtcaagaatgattcttctcaagctagagagatggctcagcagttgaatccttcctacacttacagagaacctgagttagaagctctaactcagtgagtatccccagtgctcacagtgtctcccagttgcctgtaactctggcttcagagactctgatgccctcttctggtctctgtgggcacttgtacaggaatgcatataaactcacacataaataaaatagacattttttgttttcatttcttacatagttttcactccatttttatttaaattaggaacaagattgttttacatgtcaatcccagttccctctccctcccctcctcccctgccccccactacctacctatcacataccctttctgcaactgagggagagtgaggtcttccatggggggtcttcagagtctgtcatatcctttgtgatagggcctaggccaaccccttgtgcctaggctgagagagtatccctctatgtgaaatgggcttccaaagtccattcctatgctagggataagtactgatctaatacaagaggccccatagatttcccaggcctcctcactgacacccacattcatggggtcagaagcagttccatgctggtttcccagtgatcagtctgggggccaagactcccttgttcaggtcagctgtttctgtgggtttcacaagtggtcttgatccctttgttcatcactctttcttctctgcaactggattccagttcagttcagtgtttagttgtgggtatctgcttctacttccatcagctgctggatgaaggctataggatggcctataagtcagtcatcaatctcatcatcaggggagggcatttaaggtagcctctcctctgttggttagttggtgtcatccttgtagatctctggacatttccctggtgcctgatttctctttaaacctatactagctccctctctgatggtttctcttattttgctctcctctattcttccccctacacaacattcctgctcctttatgtcctcctcactcctcttctccccaactcattctcctggctccctctcccctcccccatgctcccaatttgctcaggagatcttgtccctttccccttctctgggggaccatgcatgtctctcttagagtccttcttgttgcgtaacttctctagtggtgtggattgtaggctggtaatcctttgctctatgtgtaaaatacatatatgagtaagtgcataccatacttgtctttttgtgactgggttaccttgctcagaatggcttcttctagttccatccatttgccttcgaatttcaagattccattgtttttttccactgagtagtacgccattttctgtatccattcttcagctaaggggcatttaagtagcttccaggttctggctattacaaataatgctgctatgaacatcgttgaacagatgtccttgttgtatgaatgtgcttcttttgggtatatgcctaggagtggaattgctggatcttgtggtagactgattctcattttcctgaggaatcaccatactgattttcaaagtggctgtacaagttggcactcccaccagcagtgaaggagtgttcccctttctctacatcccctccagcataaactgtcattggtgtttttgattttagccattctgacaggagtaagatggtatctcagagttgttttgatttgcatttccctgatggccaaggacattgaacactttcttatgtgtctttcagccattttagcttcctctattgagcattgtctatttagttctgtaccccactttttaataggattatttggtgttttggagactagcttcttgagttctttgtaaattttggagatcaaccctctgtcggattggtggggttggtgaatatcttttcccaatccgtgggctgtcattttgtcttgctgactgtgtcctttgccttacaaaagcttctcagtttctggaggtcccatttattaattgttgatctcagtgtctgtgctactggtgtagtgttcaggaagtggtctcctgtaccgattaattcaagggtacctcccactgtctcttctaagaggttcagtgtggctggatttatgttgagttctttgatccatttggattaagttttgttcatggcgatagatatggatctaactgcaatcttctacatgtcagcagccagttatgccagcatcatttgttgaagatgctttctttattccactgtatatctttagcttctttgtcaaaaatcaggtgtttgtaggtatgtgggttaatatcagggttttcagttcgattccattggtctacctgtctattttttgtgctaataccaaactgttttcaggactatagctctataatagagcttgaagtcagggatggtgatgcctctggaagttcccctattgtacagggttgttttggctatcctgggtcttttgtttctccatataaagttgagtattgttctttcaaggtctatgaagaattgtgctgggattttgatggggattgcattgaatctgtagattgcttttggcaagattgccatttttactatgttgatcctgcctatccaagagcatgggagataattccattttctggtatcttctttaatttctttctttaaagactcagttcttgctatacaggtctttcacttgtttggttagtgttaccccaagatatttcatgttgtttgtggctattataaagggtgatgtttctctgatttctttctcagccctcttatcatctgtatatagtagggctactgtttttttttttttttttgttaatcttgtatcttgctactttgctgaaggtgtttatcatctctaggagctccctggtagagtttttcaggtcacttatgtagactatcatatcatctgcaaatagtgaaagtttgacttcttcctttctaatttgtatccctttgatctccttttgttttcttattgctctagctaacacttcaagtataatattgaagagatatggagaacgtgcacagccttgttttgttctggattttagaggaatcatgttgagtttctctccatttagtttgatgttggctgttggtttactgtatattgtttttattatgttcaggcgtgttcctgctatccctggtctctccaggacctttatcatgaaggggtgttggattttgtcaaagactttttcagcatctattgggataatcatgtggtttttcttttttagtttgtttatgtggtggattacattgatggatttttgcatgttgaaccaaccctgcatctgggggatgaagcctacttgatcatggtgggtgatttttctgatatgttcttggattcagtttgccagtattttattgagtatttttgcatcaatgttcgtgagggatattggtctgtagttctttttcttagttgtgtctttgtgtggcttgggtaccaaggtaatggtagccttgtaaatagagtttaacaatgaaccttctgcttctattgtgtggaacaatttgaggtgtattagtattatctcttctttgaatttctggtagaattctgtactgaagccatttggtcctgtgctttttttggttgggagacttttgatgactgcttctatttcattaggggttataggtctgtttaaattgcttatctgttcttgattcaattttggtaagtgatatctgtccagaaaattgtccatttcctttaaattttccaattttgtggagtacaggttttcaaagtataacctgaagattctctggatttcctcagtgtccattgttatgtcccccttttcgtttctgattttattaaattgcatgctctctctctgccttttggttagtttgatttgtacaatccataatgggaaaaacagactttcttgccactagtgttttgctatattgagcctctcatcaaaggcattactttcatcccatttttattttgtaaaggaagtttttaaaagatagaaatctgtcttgctaactactagaacacaagtttgctttgattaaaacgactaatggtggctcagtggttaaacacctgcatggtggctcataacagtctgccactccagttccccaagatctgtcgtcttcttctggcctctttgggcattgtacgtgtgtgatagacagacatgcagacaaacactcagaaacatgaaaattttgaaaatcataaaaaagagggagaagagaggaacagtgtgctttgatcattctcctgcctcctcggtctatgctggtgtttgtgaggccacagagctgtgttcctgcaggcatatgtgccaggtcttcacacccaggaggcatttggggcagatatggagaaggcagggcagggaatgtgtgccctttgtagcaatcataggaaaacagaaaaatgtgtttgtctttcaagcttcttgcgaagggattgccatgtgtaactcaacagaatcaatacagtcagcctttcctcttggggaccttatgattctagtaagctgctgagctaacccctgtgctcctctggggagaggctggctatctgctttgtagaactttctctcttgctgtcccaagctctgacccataatgcaagagccagctctctacccaaaggcttccagataccccctgcatatcttaatttttatatgtgtttctgcttgtgtcagggtatgctgcagtggctggctggttaccttggtgattgacattggatctttccagctgatccatgctgtccccttgctcatgcttagtgtactggggctgagaaggagccacgtgttggctttgtgttatggtaattgcacaacccctcagcttagaggagtgtgggcagtcgctcttgcccaaaactgaaaagggagaatgagatgtcacctacctggttttgaaagtgtagtcagagtgtaagagtgagttaaaatactctgcaaaataatacctgagaattaatgctgatgtcctcattcctctcatttgatttttcatttctttaaataccttgaatggtatgttcttaagtcatgatcaccttatagaatgaagattacacctacatttctttcttaaaatctagtcttgatcatatgggattttttttaatgtctccttatttggatttatttccacaactgatgtgtttggtccgtgaatgtgagagagaaaaatgacacagaacctagatccctgaagactggaaaatatcctcgtgatcctgcttaatgcaacttaaactgcattttcaagaccgatgactttttaaatctacagaatcagccagaggggagatatgaaaccccaagtgtacttctcgctgaaatcctttaaaacacttctttccccaagtcagcttaggttggttcagaagaggagtggatgaggcggagcctggcatgagtgagcgttcatcaaggcatgtcctcacactccctgtttctatgacccttcaaatgtaagcattgttaaggaatcatcacagacaaccctacaaagactcatatttcccagatagctcgttcattagttatgtgtgcttactcctcatccagagagggcgtgttaggttctaagcactcacagggcagctcatacacgtggaaatccagctccagagaatttaatgccctcttcggaccttcttggagactgtactctgctacacaaactcattcacacgcaatatatatacagttgattgaaatataaagaaacaatattccatgatatacacagaatatgtgtctatgagatatatatatgtttatatatcagattatcagaaatatatgtatgtattttatgggatttttgtcactataagtatgctttgttaaatgctgggagcttattcatcccacaggtgggagagcccatccctgattggccatgcttcacacgtggtacttttcccctggcatgtcacctatactactttcaaagttctattgtcatttgtcattgcattttttgactttgtgaaagacgtatttgtacctcttctgataacgcttcctggaattatatgttacaagtcatcattggaagtgaagcttttcataaccaaagatcttcttcctgaacagccctgaaggtgacttgtgcattgagtatgcacttaattcaaggggatttcatagcgaaaacatatcagtctttctttaaaagctaacatgatgtttttgttgttgggaatgattgttggtagatatcctctaggatacagtgcctgatgcaacctaagatttgtgcattttatctccgaggcctgttaccaaaattgctgccattaagatgattgctgaggaagatgtttctggggatccaatagataccaaggaaagtatttgatgagaatggaggattgttgaagaacagtgacccttcatcacaagggccactcaggaaaaaaaagttaatcagagaagggaagtttgtgtggctgctaggaagataagttataggtgtgtgtgtgtgtgtgtgtgtgtgtgtgtgtgtgtaggggaagctgtagccacgcctacttaggggctggctacaggtgtgcctgaccatgcctatagccagcccctaagtaggcgaggctacagcttccgtgtgtgtgtgtgtgtgtgtgtgtgtgtgtgtgtgtgtgtgtgtgtgtgtaagagagagagagagagagagagagagagagagagagagagagagagagagagaatcagttctctccttccaccatattgaggcaagtcactcttctgcctcggcatacccaaggtcagtcagcccataagcttccagaagagcttgtctgctgcctccgtctcactgtaggagtgatgcagctggcttgtagcataggttcttgggatctgaggatcagaggccatcaggctcctcagcaagagatttaacccactgtgccacctcctggctcgctgtatggcaaccatcactctttctttgatgcagatccatttactctggggcttagtgaacacctgctgtttatggggtactgtgctaagcactcagtaacaatggctgtgggtcctgctcctctggatggagtatatgaaattaaggagcagccattaagcaggggtccatgttctgtggagcaagggaaatctgctcaccctgtttcagccagtgatgagagaactgatagccctacacatgtttaattagcaaaactgaactgagagtctgtgaccaagccaagaagcgaggtttcagggttcagcaggcatctagaggcattgcagaaacacggggagacagcagaggagggagcattggtgagtgatggttatgacgggtgccggtgctgagtggggcctcccaactgctctccatggagacctagagatcatttaactcctgcacactgcacctttgtgaagatgaccgagtgagaggactgtggctctcccttctctacactcaggaggtttctgtacttcttgtagcagcttttatatgaagcacagaaatgggctggtttctaaatctgaatgctgatttctaaaatctcaaattataacttcaaatgctaggcagatctaattacctatgtttaagagtaattaaaaaattctaatttcattttatgtgtatggggattttgcctgtccgtgtacctctctgtactatgtgcactcctgctgccttcacaggccagaagagggcattggatcccctgaaatttgagccacagacagtttgtgagatgttatgtgggtgctgggaattgaaccctggtcctcaggaagagcattgaatattcttaacagctgagctatctctccagccctgtaataaataacttaaaaattttttttgagacagggtttctctgtgtagccctggccaacatggaattcactctgtagaccaggctggcctggagctcaatgagatcccctgcctctgcctcaccaagccttatgctgggattaaaattgtgcacccctactgcccacctaattacctcctgtagctttacattttcctgtcccaatggcatcactttttttaataggtcagttattgttgaagactgaagtcacgagattgcccatgcccctgtaagaatgtttctgttccttatgcaatttgatgtttcgaaagaaagatgcacccagcagaaacacctcatcaaaaccacagtaaagcaccattggtaaattgataatcaatgccagaaattaagatcactatttgatatccaaactgaaatacttatagagaaatgacaccccacttctgtggtttaagtcagtatccctcaacaggtcatgcatgctgtgacccccaagagttagagcttcagagaattccctcaggtcactgaaggtatgcttttacagggtgctgtaggaccttgctctcttatttatctgcttctggcctgccacacacttttgtaatcgttgctcctctgtgttcttcaccaaagagctgaatcaatgaggttgcctcaccccaaactggaacttccaaagtgatggacaagtgaacagtttttggtagttgtattgcactgagtattttttgtgatagcaatgtgaagctgaagcactaatttccttagagtggttctgtttatgctctacctgtttgtgtaatgcatgtatcacattagagaactggaggaaggtcctggaattgatcatagtactcaagaatgacaactctttaaaaccagggtatgttgggatttcatcattaatattttgtgattcagaaaaaattacaagtcaaaaaattaaggggacagagcattcatggtttttctgtgagttggaagccaggttggtctacagagtgagttccaagacagccaggactgttacacagagaaactctgtctcaaaaaccaaaaaccaaaaccaaaaacaaaaaacccactggggtggatacaatgattaaaatgagaaaaagggccttaaaaaataaaaaaattaaaaaaccaagttcttatttttaaaaattgatttattgtaatgaaattacacacacacacacacacacacacacacacacacacacacacacacacacacaaaatcacacagcttgattgtggtagctatgcaaacactcacctgatccctaactcaagttgtgtggaatagaatagtgccaccttctggaaactcctggaggacctgtcttctgatgcatggggctcctgtgtggagccaaagagggctgtgtgtcttcctggcttggtgtctttccctttagctgagcaccttccatactgcatgggtggagttctttcattgatactatagtctgattattgtcccctcctaaatttccattacccctttaattacactaagaggtgtcaccttcatgggttattatgtcacaagggctcaccctcttgagtgggactggcactgtcattactgacagtcttcttcttcttcttcttcttcttcttcttcttcttcttcttcttcttcttcttcttcttcttcttcttcttctcttcttcctcctcctcctcctcctcctccctccctccctccctccctctctctctctctctctctctctctctctctctctctcctctctctcctctctctcctctctctcctctctcctctctcctcctgctgtcatggcatgacacaccatggtcattccgtattaactccccagcccacagagctgtagggcactgttctacaagtatgaaagccaccacccttatcaagacagctgccattgctttcaagagaccccaagatctagcttgttgactgttgatgctggctcttataaggaggggatggaagggtcattagattcaggctgctccatcaagtacctcttgaccagttgtatgtcatcctgtcctaattatccctggactcatggtctcagaagtgcttgttgattgatggggaactccatccatgcagttatggggcgtcaccatcacctggctgggacgagatgttctggtattgtggctactttgaggtctctacacttttgtaagtaacccctcattcatgatgtgtaagtaggcccaggaaacttactagtgctccacattggaccttggtttgttgtcagtgtcctgtacagagagcatccccacaacaccaggctgtaggattgctgtgtggactaaggtgcagggtaatggggtggcccttagcagccgagcacgtgggtgatgaaataaagaagccatgctttggagcaactcgactgagtttgcacttgagctctgcagctcatgtccttgtgggtcttgctgtggttattgtccctactctgacagctccgttgtgagacactagggtttcagagaagttgtgtggacccagcagtcactccagctccggacagattgaacctgatggcgcttgcgtcatcaactttatttctgagaaggcaaatggagatgaagcttaaacctatacccaaaggtatgaatgatgccctggctcaaatataaggacctcagctccatcagcaccccctgcagaacttctgggtgggatggctcccctcagtgccacctgctgtccttcaggatggggtggttccagccatggaagctaatcaacgaggctaagttctctcatctcccccagtagggtttttgaatattccataaatgagttgaaatgaacatattgactgagcaatgtagggcacccagaatcagaaggtcctttgcatgtccccatgggctcttctctaccctcccccagccaggattcttggggagcaggcaggaaggttctctcagtgcttgatacaggggaggtttccaactactgtgtctaggaaacccagtttgtggaaagaatcaattcccagctttgtgaacagcacgaaccttcctgagttatatttttagtgatttaatccattatattggatcaaactctggctgagttcctcttgcaaatgtcaaggataggagatctagtgagagaggcaggggggtacagagagggagagggagggagagaagaatagagggaagaagagagagaaagacagagagagagagagagagagagagagagagagagagagagagagagagagctcaaaaggatgcttccacatatcccagaagaggctcagaaagcttagatttcctgtaactatttggaagagttgatgaggttcctgaagctgtctgcccccacccttctttggtatttttattgctatctgtatattctcttataatgagccagaaagctcctaaaacggaaagagcttatgtgcacattttctacggcaacaaggagagaatgaagtggagaaactgttctgccaagtgggtggagaagccaggtggggagggagggagggggagggagagagggagggagggggaggggggagggggaggggggagcagcgtgctgcagtctgcaacacagacagagagaggaggaaaagaaaccagtgggcatggcacggatggcacggagacagcaaggacagaggtgttattcaagcgaggacagagacgtcaccacatcccttatcgtttatggtcccgagagcgtcttaggtgtcctctaggctgctatgggctcccagtcctctcccagcatcccacgtgctgattacagacactgccagctgccgctcccagctactttactgtcttaataagagacatctggacgaattcccaaacaatacgtagaaaattaatactcctgacaatggcgagttaaaaaagcactttcggtggttaaaagcacttgctgtttctgccgaagaccagagtttggttcccagcgcccacatcagctctcaactgctgttaactccagctccagggaacctgacctcctctctggcctcagcaggcactgcacacatgtgcacacaaatgtgtactcacatacatgaaactaaaaatagcaggattttagttatttactcattttaaaatatgcacccccaaaaaaaactcatgttatctgaacattacagatatactgacttagggaaaatatttgcaccacatcagctgattaatgtgcaaattaacttgtaagcctcaggtctgggatgcaaatagcataaatagttgtctgacaaagctttttttcttggggtttttcttcttagatcatctagctgccagtatttcattttaagagtggtaattaagaaaggggaaaaaaccttttccatgactttgaatcactaaaacttctgggttaaacattttacccaaatatgggccttttggtgattaagctatcttacccctttccaactgtaacatcctgtttattaaaaagacataaaatgtcatctgcagtattcaggctgtgctaacatcagagtgtccctgagctcatgtgtcagcagagtcctgaccacttgggtgaagttggggttcttgtttctttttcattttggtgtgaaagacagagttctggggatggggggggtcatttgattccagtgaaatggaaatatttgttcatttgctggcaggcctatctgagacggcttctcactgtctgctctggctgtcctcaggctgtgtgtctgttcaccgtgtttacctgctagagccctctctgcccacttgtcttgctcttttcacatcccaaagcatctttgtgggggctccaaagttcaatttatttaggggaatgttccgttaatattttacacttgaatgcagtgtgcactgtttttctcctagccatggattgaggttttgtgcatcccgagtgtctatgaagttggtcccaagacacttgtcccctgctctgtcccacattgcattaggcctgcatttggggattctgctggctggtttcatatgttggtttctaaacatgtgtagcctgtcaagtcccaacttaaaccattcgtgttgattttagtcaatgtctttgttaccccttctacagttactggtcatcttccgagtaagagtctgtggtcatgagagacaatccttgctccacctctgccctggctctgcttcccaggctaagcctcaatcaacacggcaatttcccagttgctcccagagcatctctttgggcttcccaccactccttcccctcagccactaagacccttttgatcatgcactctcccctgtaaacataacccggtccccactgagtcagcatccaggctatatcatccaacatgccctatttctctgtacccctcacttgagcttggccagtgtctggcccccctccctatgctgcctgacccactacaatgtgccttctcacctgtcttgacactcctcacttaaacatcccccatcttctcatttcctcccttcctctgtgctcatccacagatctgtgtgaccttttctaccatgagcagctatctatgtgaggcttgctttcctgttcagtgtgtgtgtgtgtgtgtgtgtgtgtgtgtgtgtgtgtgtgtgtgtgtgtgtgtgtgtgtgtgcagggcacacgcatatcagaagtcagaggacagactcaggggtcagttctcgtcttccaccgtttcctgagacagcccctagttcactacagcacactccgtgctagctggcccaggaacttctgagagttttcttgtctccatgacccatttcatgtctgcatagaagccatggggttacagaggtgagctctcacattttagcttttgcattggtcctggggatctgaactcaatgcaagcactttacacaccaaggcatctctccatgtgaggacttctcaggttaaagttggacttcggaagacatagccttgactacttatttgggtaaataagttactatttcagggattgacccctcataaccccctcgattagttgtgctgaatggaaggatgtttgtaattgtgcatggcagaatcctgcagtacagtgacggcagcacacagaattcccgtaaaacaaaaagtgctcttctgcctattctttctggacatgtaggccttaaattgatgatgtcatgggaattgctcagagataataatggtagcattgcctgtaaagaccaccagttctccatagacccatggctgccctgccttggccttgcgaccaggccatcctgcctaagacctaaaagtaatagtcatcgctagagtcactcacttacggttcagtttggcggacccgctggatggcacaggttgatagacagcaggtggacatacatggtcctctgcatggtgtggacacagactctccttcgtacttttccagtggggatggagagaggtttagtacactcggagcaattgggttctgagagagacagatgctcatacctgacaaaagaaacaggacacagggtcaggtaccatgacctggagagggaaggaagcatccttcagaagcaccttccacactttccttggaaacctgagggttgtgaaagtgaatgagaaatttggtgtgagggaagagcctgggtctgtggaggaggccgatagatctgcccttgagcagttagttgttggctcttgggattacaattgttgtgcccgacgacaacaactttgcttttctcttgcaggtggatcagacattgagtatctggacttgtacaagcctgttgtttggttctggatcctggtggggcttgcttactttgctgccgtgctgagcatgattggagattggctgcgggtcatatctaagaagacgaaggaagaggtgaggctgagggtgcatgggaacagcagccaggcaagggttggttttatgttcttttaaaaagatattcacaagtttcaacacttaatgtttgcatcagcatagaatttactgtatgaagtaataaaacacacaggagttatagttaagtaaatataagtattgttgagtacttattattgggtcagtagctatttaggaactcaggtttatttgtaatgaaaaaagatataatttaaaatattttgttaattatgtgcttttcttttgtgttctttctttcttttgtgcaatggcacaaagtgaagtctattccatgaaaagaaaactcttggactgtaatatagctccatggtagaacacttgcctaacatatgtagaaccctaaattcagttcacagaaacgggggaaagtgtgtcagtgtataagggaatgaatagtgattgatctatatatagtgatttatttcatcttcttcagctatttcctgttttcttatgtctatataaatgtgtgcatgttcacacatggacatacatgagtgcacatggatacacatacgcgcacatggacacacatgcgcacacatggacatacatgtgcgcacatgggcatacatgcacacacatggatgtacatgcttgcacatggggatacatgcttgcacatggggatacatgctcgcacatggacatacatgctcacacatggacatacacttatatattagaaatctgtgtgcactgtgactcttttcttcaccagaacctgcaaatattcagaattttgtgtattttatacaacaaaatatatagtactgatcttgagacttgtgatgcatgaagttttttagaatttaaaatgcattgacatttattccttggatattcagtttcattttgtatttatatttgcagaagtaccgttggttgttggaggatgactgagttgtgggcttgtttgcttgtttatttatttatgaatgcattttcttcgggtgggacttgccaactttgctaattgtttaggggagacacagggctgtgcgatctgcacccatggcatgtgacgcctttctttagtaaacctgtccatttcattatctgctgtccacaggccagactacaccaatgtcaaatctttggttgttaaaagcacatcttctttaaatgtctatcaaagagaaagggaataaaataagaaatagtgggtttgatttctttttacaaattttgtcttactgtttttgaagcatgtcaagtcatacggtgtttatggatagcttaggtcctaatggtaacaagaagagtgtgagttaacctaaagctacgtcccgtgggtaccacattgcccagttgggatgttgtgcatttagtctagatgtgttcatctgtgtctcggttatgccatttgccagatatcattttattgtgagaaaatcagcaagacgaatgctccatatgttaaattgggtcaaagacctcctttatgcaggaccagaaaggatctaagtcatgagcttggggtgtatggagtggggaacgaggagaaaggaaatgtttacttgaacttcatgtatactttttctgaatcttgaaattctcagggataaaaagaggttgtagtcagaaaaaaaaattggataacagttaaaaagaaaggaacttaggtgttcatctaacttaccttcaagtgcatcaaaatatcggcacacgtgtgtgcatgcacataccatcatttcttaaagcttgaactttgacagttaagaaaatactattatgtgacacacatatatgtgctctaaattaaatacgtatatacactaatacctactgtgacttcagagagaatgtctagatgccactgaggtataatgtgaggagaggggattttatatctttatacaatccatgaagttgctgtattatgtgtttaagtgtgaaaacttggtcatggtgttttttcaatgggattagctgactgtgccctagatcgcttctccagagtaatgacatagcaactatgtctgtgttcggggctgttagaacaggtgcagcaagagctcaattttctccctgctctacaagctattaagtctaagatggtgctggcaggaatggtccatggcagacctcactccctggcttgcacaggtcctagctggtatgggccatggtgaggccccactccctggcttgtacattgcctctttcttgttgtatcctcaccttgccttttagggatttatggagatttgggtatagtccatgacattgtcttttcatataaattcactcttttacaaaatgtgtttgttacatgtgaggtcatatgtccattgtcaaggatttccctggctctcagctaaaagtatgagtgtgtttgcatgctaactcagcatggaaaaggaagaagctacttttttcctttccacagaccttttgactactacccaatgtcccaagtgccatgtgctttctggaaacagtgtctgtagagtcatgtgagggtggctgtggccagagacagtataagccctgagctgcagcagctccagttgaacccatggaaaatgagtgtaatttgagtggatgtgtattttctgatttacgatgcaatgtagagaaatgcagaacaaggccacaaattcagtgaagaatgtgggggtcggggagaaggcactgtgtaactaatttgggcaccaggaaccaagtatttaataaacgacatcatgcttagttacctatcccagtgagaagataatttacactttgaaatagcttggtgaagggtatgaccacagctaaaccaaagtgtggattcaggatcccgagtgataattctatgacacatactccctaactaaaataaacagattttagtttaataagtctaagcatgacattattactttgaaatatggctgagccatagtgataaaatacaaatatatatgaaggatttaaataatttcaaatgttaaaccatatgctgttgccatcgaggaatcttttcaatggaattaagattttggaagtaaagaaaagcatagctttccctcagagtgatgtagtggacattgttggtctagcgaatccatctgaagtgcttgagaaggaagcctctggttgggagaatatgacatttatccagaagcaccacaaataactgtagttggtttgcatttctcaataacgagcttacccactctttcctggagacatatgcatgtctgaagtgtgctccttcattattgtttttaagttcccagcgaaggtagatggggtttagcagaaaatattaatagaactaagtatttctcctattaacccatgtaccctattctgtgaggggatcatgtttccatttaggaagcagagagtatttcactacacagtgtaatataatattactgataaccaattcaggtgtaaaaaaaaataagatatgctcacaacacccagaaaataaaatgggtcttgcgtaggagcaaagtagggaagaatgaaccctgacccagacattgcttagtcacttactgtttacagctgagtgtggaagctgtgacttctatgccagaagatgtgttgtggtccatgggtggtaggcagcagcagtatcccaacacagaatgatggtcctgccaagccttgcagaagagggacactatgaatggatgccaagcaatgctttttaatcacaaatactatttctttagtctctgaaaatattgacatggatttgagactccaactttcatgagttggccatctgttattgaagaaaataaccagcatctagggcttctggcactctggcccccgaaagactgtgaactggccccaggatcaagaagtaactcaagaatatggggggagaaatgtttcttcctctgaacacatagtgacatcattggtctctgtaccttgttcagcgtggtagagaccctttccatgagagaacttaggggatcaatgtcatgtccaggaaacagacaacagaagaagagatctgggttgagccctgggagctttgcaaaacaggaactgatcagcatcacttaagtgagaattgctttctaacactaggcttccatgtctcatttataacagcttcagctttctcctgaaagtactgaaagatgttagggaagtggaataaatactttgacaagaacaagaaagatgagtttgtagatgcagatgagagcgctcagttggtccaggtagtctttgggaacaatgaggtaaagatcaaagtatttattccagaaacacttggtggctgtggctagaaggaatgcacttcagttgcttcttagtttgtatgataagaaaacaaaacaaacaaatgacaaaacaaaagatggtgtccatgattctaactaacttcagtagggtacctatccatgattctaacttcagtagagtactcaccacaggaaagaacacaggaaatttaaaaaaaatgaacagatagtagggataggatcatttcattttgacatatattgattcgtagataattttcacatccaaatgattgatttaagcgtaacgcaatggatctgcatgtcttgttgtatgggagaatggaagctgggaagatagtttggagatcatgactatgtaagtgacagtggattttgtgagtgtagataaatgtcttcatgaatatttgtacagtgagacaaccacagacataaaaatgaaacctggggcaaaacattcactgaaggagctgaagctgaaggtggagacttgcatggcttaatgaatcctctggcagcagattctgttgaagaggcaaggatgtgaagttttggaggatgataaaatgatggattgtgttagctaaagacagtggagaagaaaatgaatcacaggaaaacacagcatcccatgaacagattaataaagtagctcatgtccctctggggcagctgccacttgggtgccactcctctagaaagccatggaaacatcattctgtggggtttgcagagcatggtggccatatcctaagatggtcctccaggctcctcacacacaatccctaatatagacatttttctcttttgtttttctcctcacagctgcctgtccccttctttctttacacctttctcctccctctttctctgtcttgttttcatctccagattgcatagttgacattgtaggttttttactttaatttctaacgtatcacaggggaaggacaatacgggttagtataatttttaaatcttttgacattctctcttattgggatactatagacatggtatgcatgatcctaagatttctccaatttatatttagtatgtatatgcattaaagatacttattttacccttactagagtgttatatgaaagaagctacatccatcaagtatattcttaatcttattaaaagtcttattttcaaaatagaatagaagcaggtgatgtcataatgtggcataaaaattcaggctttcaccccccatggagatgggatgcctctcctcatggcacagtgcaaaggtctgagtgtcaggctttgctagccctctgctgattactgtttgactccagcacattctatcaaggacagtttcctcagcctcccctctgagttacttattgagtaaaggaggaatcgagatggagagtcacaggaaaagagcagagggatggagaaaatgactcagtggataaagtgcttggtgtacaagtgtgaggaccaaagttcagatccctagatccacataaatgcagggcaggcatggctgccctctgtaattccagcactatggaagcagagaaacaggggatccccagagcaagctggatagatagatgagctggagtcagcgagttcaggttcaggctcagcctcagtaagtaaagtagatagtaacagagtaagacaacccttgtcaacttctgcaaatgtgtgtctacagacatgtgaacatgcatatccacaagcatgcacaccacacaaatattcattaaaaagtaagtaaataaaattaaaaagtaatactgctcacacgagaccgtagtgacccccaaaggcagtagtaactggcaggtgccagtacatgtctaatttctaagtggagtttttttcttttgtctacaaaaaaaaatgattctataatcatctgtatgatttctgaaaagctcatgggatttgaagcccacagaatggtgagttaaaattgggaggatctataacttggagtctccattttcttccaaaatggggtgatagtactttatgactgaagaagcattctgtgaaaacattgtgttgtagccaaatgcttccttcagtgtttgtttgatttcgtccttgattgtaaagaccaggataccaaattattatggactggagagttggctcaagatcactggcttctcctacagaggacctgtgtttggcttccaatgcccacatcagacagcttacaatggcttgttcttcaaggtcctggggaaccaacttcctctcctggcttctatgggcacacacacacacacacacacacacacacacacacacacacaaacacacacacacacacacacacacacacacacacacacacacacacacagttttgttaagttctgtggctgccatctgggtagcaagcatcacctgctgttatgtgcacagctccaatccatttctttgtgttctggggacccatacttactcaccaacagtttaaatgactgaaatggtaagcaaatacaaaataaaagagaaacaagacagcattgttcctatgtatattggcagaattccatcataaaatcaaagtccagaatgttttaagggcaattttttagctacttggtgaatctaacatttgtttttatattaactgttgtttaggtcaactcagaaagctagtttcttaattcctttcttgaatccaacccacagattttctgggttttccagtcttaacgggggcaagaatcaacatgaattcttccatttgctaaagcaagtgacagtatcttaattgccatcttaaataaaaaatactctggattattctcttctttcttttctccctttgagatgttaggtcagacactgttgatgagttgtgtcatctttatgtgtcacgtgttgcaggctgctgtctgccagtagaaacctgagagattcttcctcttgtttcatagacggtacaatgggaagtcaatagcctccgcctccagacagttcataagtaatctcatttactttaagattatttcatagagaatgagtgcacaaggatggtatagtgttgtcaacctcgtttaactgtttggaaaccatcgtctctgagactctgtgttcggaaaggtggctaccattaacttacctttcaaagtcatttctgaactctctcattaaaccccgaagtagcgtgctttctcaccctaagaactgaactaaagcacattttacagatatccacactcatatgttcatacacataaccccaagtgtgtgcgtgtatgtgtgtgtgtgtgtgtgtgtgtgtgtgtgtgtggtgtgtatgttgtgtgtgctgtgtgttgtgtatggtgttgtgtgtattttgtgtggtgtgcgtgtgtgtgtgtgtgtgtgtgtgtgtgtgtgtgtgtgtgtgtatgtatgtggtgtgtatggtgttgtgtgtgctgtgtgttgtgtatgttgtgtgtggtgtgtgtgtgtgtgtggtgtgtggtgtgtgtgttgtgtgtgtgtctgtgtggtgtgtgtgtgtggtatgtggtgtgtgtttatattatgtatgtgtggtatgtgtgaatgttgtgtggtgtgtgtgtggtgtgtagttgtgtgtactgtgtgtgttatctgtgtgtctgtgtgtgtggtgtgtggtgtgtgatgtgtgtatgttatgtatatgtgatgtatgtgtatgttgtgtgtggtgtgtgtgtgtatggtacatgtgttgtgtgtgatggtgtttgtgtgtgtatgtgtgtgtgtgtgtgtgtgtgtgtgtgtgttatgtgtgtatggtgggtgtattgtgtgttgtatggtatttgtgtgtatgtggtgtgtatatgtgtatggtgtgtgtgtgtgtgttgtgtatgtggtgggtatatgtgtgtgtgtggtatgtgtgtgtatgagatgtgtatatgtatatgtgtgtggtgtgtgtattcaagagttgacatctgatgtcttcctcagtctctatccatcttatctggggggcaggggcagcatctctcattgactctggagccctgatttgtctagactggctggccagcaagccatgaatcactgtgtctctacctctccagtgctgggttatgggctggtgccagcactcctagctttttatgagagtgctgggactgaactcaaggcaccatgcttgcacaacaagcacctcactcactggtctgctccccgacccctagagggttctttccaaacagatgtctgtggttgtttgaggtcaagagtaggaggcactgtggggtttaaagtcagatgctcatctctctcaccagtggggtggcttgtctagtggtcagtgcgtggcatcctaactgaagcaagggaatttcactcttcctgcttcacatttgatttgagcccaataagccagcttccaattagtgattgtgtttgcacgcaccttgagtgtgtgcatgaaatctcatatctcagagaagggagttctttccccaatgaaagtggcaggcatcagtaccatggtcagtggggtacttgaatgtgtcttcccttccaggatacacttgaaggtcacatctgtttcccttgtggttgtcgagtcacagaaatagagctgtccagctagtgtaggcagaactgacaggagcaaattggatcaactaattgttcctgtggcctcctgggttctcgcttggtcttgatacaagacctcagggaaggagagctgtgtcaacccagtctctgtgtgaccacaggggacagaatctctcctgacctctgggtgaccagaaagaaccagaaatgaacctttgcagcatgaagccactgagactggggcaggggtgggcttatttggtatgagcccctccccatcatgactgttctagaaacttctagttgttatttctgtaactcaaagaaagagttaaaaatagtaacgacaatttggtatagtctgagcttgtgtgccacattgtttctgtgttttgcctttttttttccaactctctgacaagcttaggtacagttgttaggacttacctccttaggtgtcctacacctggcgctgggatttttgttggataaactatgactttggggaccaacattatccaagctacttcaattcaaattcttcttaattgtatttttaacagcttacgaaatagtagggttccatgtggctttttcatacttccttagttttagttaacattcccccccatttcttcatcttctccatctccttttaaaccttcccaccccagtattcctcctcttccactagaggaaccattcctctccctacctgaagacctcttccctctgcttcctggactgcaggcacttccagctaactcccagaaatctaaaatattctgagctacaggtcaattacaaagggagagcatgtggtgtttgccactggggtcctgggttacatcactcagtactttccaggtctacccatttagctgagaattcatcatttcatttttctttatacctaagtagaatcccattgtatatatgtaccacaatttcattatctgctcaccaatggatggtgtctgggctgatccgtttcctagctattgtaaatagagcagcagtgaatatggacaggtacagattgctggaggagtattatagcatccatatggtacttgatcaagagttctatttttagctttcaaagaagctcccacactgatttccacagagactataccagtgtgcacacctaccgtcagtgcctgagggtcctctttcctcacctcctaggcagccagcatcctctgccacttgttttcttgattgtagccattctgacgggagtgagatggacccttagttgaccttggtgtcaggatattacagttataattattatttataaatacagtgctgtatttacttagtttttttttcctgccattcatttgtttttgactagacacagtttaatgtagcagaagagggtttggatttatatgtctgtgtttttggcctctgaactgtcacaaatatgttccacttgctgccatttatcacccactgatagtgctgtagcctgccctgtgggtactgcaatgctcaggtacatttctaccacacagcagtcctgcgtctgggggtggcctcctagagaaactggtggtgtggcgaggggtttacagccttgtgtgtactgcaatgctcaggtacatttctaccacacagcagtcctgcacctgtgggtggcctcctagagaaactggtggtgtggcaaggggtttagactacaggaaagagcatctgtgatccccaattctttcttctcttctctttccctggaagtttttgtttcctgttatgcaaaccatgtgtgcaagttccaggctcatctgacagaaaagataaagacttgggaagaactcaagcctacctgagctttacataaagccctgaagccgtcagaaccagacacaggcagaaggcccatcaaattcaccccctctaagagtggtttattttgagagacagtgaatctctgtttgttttcatcagtctaagatgaataacaatggtgtcttcacagtcctggagagacagtacccacacgaagtcctggagaaggggtacaaatgacattgctccccctggcttttattaacattcaggaatattcttcgcctcctaagtactctctgcaatacaagcttcttaaaatagccacagtgaggcacagcggagacagctctgtgctacacgggcgcaaaccagatggaattgtgtggtctgggatgcaaagggtggtgtaaggaccaaatgtgggagtcagcctgtcttctaagactgacgggggggggggtgctctagctccctctgtcttgacagagtcccttccttttcatactgtgtgtcagtggctgctgcagacagctctgattgccacaggcaaggcatggtccctgattccagccaggctgtcttccagatactgagagccacaccataggaggttttttggcttttttgtttctgcttacttgttcagagtcactgttttccctaagttctcctctcacaagccagcaggggtgcagcctgggaggtggaatcccatgggcccctgagccaggtgcatgcagtccttctctgctacagtgagaggccagcccttccatggtccctgctcccactgcggcttctgttactctcccccttttcgcctcgtgtctccgacactgtaatgagagtacagccccatgcttgtgagagagagccgtcccggcagcaggcagtatttctgagggctaatttctcggtgctatatttggctcgtgaatggcagctgggagcgcttgcacagtgtacaggaacactctgccttattagaccctcattaaaatagggtgggagacactgctggttttagaaagtgaatatccactttgactattcatttgtattcctggttgtctctgaaagctttctacttgttcataagaagacaaaagtgtggatcatcactgtcccaattcaagatcgtgacagaagggcatctctagaccagtgcttcataacgtaaccataatacacaagatatcttacacgtcaacatgtatgtcacaatataatatcgattattatatgtaaaaccactgtatataataatataacataaattatgcacagcatgcttagtaatgcatgttattaacatagcattatatttaatgttgtttcatgtcatatagtacatagattatatatcgctctatataacaaacatgagctatattaactttatattcccaacagttgtgaataatgtacaaggtacaaacacaaatcatctatgtacaaaatatttctaaacactatgaagctaattttatgtatatgtattaatagcaaatatacatattttactgtatttgggtatttttcccctgcgtatatagctatctactgcgtgtatactgtgcctccagaggccaaaagagggcatccaatcctctggaaatagatggttgtgagcctccctgtggtgcagggaacagaactctgaaagagaagccagtgctctcaacctctgagccatcttcagtccctggaagatttgcttttaagagaaatttctggaagcagtttctccttggaaaaataagttggagaaacacttcttcctgggtctcatgaatattttcttcggcgtgccactgtgcagtgcgaaggcggtaaaaatatttcagggctggtagagcatcggtttggagatgactgtgtcagcctcttcaggcagccgcaggagagcagctccgtggagacggctcttcagcagcccttaccctgcatatcctgtcctgcacattgtcacactctcaagcacaccagctgcagttttcatctgcactattctgtaatgcgctttatctgagagcagcttagccaggaaagcaaaaataacctttcctgtgatttctgtagagaaaaatattccatatctactttgcctgggatagagttttcagtgtgctgacttgtaatgaatataggttctgcacaatggcttccagatgtaaaatatccctatcacactgccactgtgctcagacattagtagatggtgtgttagctgctataagtcctccactgtgctcagacattagtagatgatgtgttagctgctataagacctccactgtgctcagacattagtagatgatgtgttagctgctataagacctctactgtgctcagacattaggagttgttttagctgcttctctgctgctatgacaaaatacctaactgggacaacttaggagagaaaggctttgttctcatctgtggtccagagatggagtccatcgtgaaggaaaggacagaagggaggcagggaaggagggagggaagaaaggtgggcatagggacaaactcctctctgtggcactgggagcctacttgctcataacttggtggatgaggagtcagagaaggggatgcatgttgctgggcactctgctaattttctctttcccattttttactcctggggtgtaacactgaatgctgctcacattcagtgttggttttcttcccttgattaatccgttatggaaactccctcacatacacagccagagctgtgtctcccaggtgactccgcattggctcacgttgataatggatattgtacaaccaattgggctgaatagtttaaaaacaaattaatttgtttgtatgataacaataatttggaattttaaccactttatttcagacatggagatcgatgctggtgattaaaagatagcccacagtgactggaggccagtgaggtgcatggtagactgttctgcgagctgagatatttgcctcagtagagtgtaatataccaataatacttgagggaatggtcattgtataggctactaggatggacaattgaagagtggcctgtgcttcattgatctattgtctctgaagagagtaaatatggtgttttttccttgcaaagtatctgccatgtggcatcctgcaaagtcatttgtcatcatagagcagagcatacaatttaaagaaagaaaatgcacagttgatctttaagtgtcctgcctcaaagaaccattgtattgtaacacaagatgcccatggccaggtcctgtccaatcaacatgacaggaattctatttagaatttttccccattgctcatagctcatagcctatcgcacatctctatatggtgggaacagtgaagggggggattcttgtccacctccccacctaggacattaccctgccctctgcattcctcccagaccacaggaccatgaggtcacagaagtccacctgtgtcactctgtgtagtaagtggtagaacatcgtgatgataaatcacagtaaatgtcccattcctccccatgatattttgtcagccaaagtaaagttttaaaaatccaaatctgatattgttattctgtattttaaaattctctgtgtgcctctgagaattaagctgaaaatcttttacatgactggcaatcgcatgtactttgcattctgtttacttcttgggtccatattgtacatttatttacctggtggattgtccagagccttctctccattctctggatgtaccaggcttcatcacacatcacttctgtccctttcaagtgtggagccatggccttgagcccacttatcaacacctgtcaccctgctgacggtgggtcaatcagatcacagagctggtgtcccatctctgccaatagccaatagtctctggcactcagcctaaactatccttcctttcaggatctcattggaagtcttcatgttgtcttacttgtgttgtttgttgctgttgttgttattgttctgagccagggtgtggaggtttgaagaggaatggctcccatggactcgtgtgtttgaaggcttggcactgttaggagatgtggccctgttggagtaggtgtggctttgttagaggaagtttgtcactatggagagggctttgaggtctcagatgcttaagcccaggctcagtggcacacagtggatccagatggagaactctgggctccttttccagcaccctgtctgtctgtatgctgtcatgatgataatggactaaacctctgaactgtgagccaaccccaattgaatgttttcttttataagaattgccatggtcctggtgtctcttcacagcaatagaaacctgaagacataaggtcttctgtgaccctggtgggccttatgttcagcctaatttcaaattaattattctcctgcctccacttcccaagtgctgagatttcagatgtgtgccatcatgtctggttttacttttgtcttactcttacttcaccacagtttgtgttatattgtgtgattatttttccagtgtgtggtgaactctgtgggggcagggctcttccttgcaacccattccattgggtttcttaattacaaactcaccactcacatcatcctgcccaggactccttattgtcctcctctctggcatcatcaggcaatctctctgtagcactctgtagtccatttcaatccatggacattgctttgacacaatgtgtacatagtatgttgggcatttgagatagcatggtgtataaaatcacacttccaaataggttgctttgtatattcttcctcctttaaaagtaaagactgtgcacagccacacacacacacacacacacacacacacacaccacacacacacacacacacacacacgcaggcacgaacacaccacagacacacatgcacaggtacacacagacacagacacagacacagacacagacacagacacagacacacacacacacacacacacgcacacgcacacgcacacgcacacgcacacgcacacgcacacgcacacgcacacacacacagatgctgaacttacttcatgtggtaggtgtctaaaacatttactgagtcatgtgtcctttgggaattcattatacatgtctgtggtcttctttctccaattaaaaacacaaaacaaacatgaatcctaatagcaaatacctactgtaagatgtccttataggttgctggctgggtgatccttcccacatcaattatgtctcaggcagacaaaatatttatattttcttctcagaagctggggagatggcttcaccagtaagactgaggacctgagtttggatccccagcaggcatgtaaaagcctgccatcctggtggcatgtgtgtggcatgtgtctgtaatgccagcctagggaagtagagttagtagagttccagccagccaaagccaattggtgagctccaggctcagtgagagaccctgtgtcttaatcaggtttctcttgctgtgacagagaccatgaccaaaagcatcttgaggaggaaagtattcggcttatccatctcgtcacagtccaccaacaaaggaagcaaggcatgaactccagcagggcagaaagctagaggcaggatttactgaagcattgaccatgggggaacacaacttactggcgtttcctctccatggattgctcagtctgcttttttatacatcccaagtccacctgcccacagcgtggcacctctcgcaatgtcctgaacccttgaacgtcaaccatttgtcaagaaaatgttccacaaatttgcctacagaccaatctgatggagccattttcttaatggcttgcttgtgtcttgttgatataaaagcatccagcacaccctgcctcagttagtgactgaggaagacaccgactctgacttctggcctccactcatacacacacacccaaacacatacacttccacactgaacacatatatacaacacacacacatgtacacatacttgagagtgagcctatgtatgtactcccatacccaaagtgactctggtttctctccatggaccaagagcaaggagtgggtagagtgacagaaatgttttcttgcacttgctcaagccctgtatttgaccagcagtcattctaaaccataatcttttggggagggggagaggaaaggtttattttagcttatggttgtagtccattaccaagggagtcagggcaggaactgaagcagaggccatggagaagtgccacatattgactttcttctcccggtgtgctcagcctactttcttatactaccctggaccacctgtccagtggcagcattgcccactgtgggtagatgcttccatatcagtcattaatcaaggaagtgctccctctcagtgtctacacactctgatggaagcataaattctcccactcactgtctacacactctgatggaggcgtaaatgctcccactcacacaatctgatggaggcatagatggtcccactcactgtctacacactctgagggaggcataaattctcccactcacacaatctgatggaggcataaatgttcccactcacacaatctgattgaggtgttctcagttgaggtctctctttctaatccaagctcatgtcaagttggcaaaacaaacaaacaaacaaacaaaacaaagctctaactgacacagggatcttgctgaaccttaatctattttttgtttgtgaaattacagaatattttctttaaaacatctctgtccatgtgcattttaagttaaattctaatattcttccttttgcttgaatagttgcaaaggccacagtgacagtgtgaaatttaacaccatggcatttctgtgtgtcttctggggtgctccttgcatgtcactataaaatacaagtatcacagtaacttgccctggatccctggcgtgtacctaacagagataaccctccttgcttcctctgtcagaagccctgaggctgggctgtataaaccactgtctgctgacttcttcattggaatgaaccttttccctgggtaactgacaatcttgtgtggaggctatcaaattgccaatttgtttatttctgttatttttaaaagattgtgagtgcatgtctgtgtgtatgagacagtgtgtctgtgtatgtatgtgtatctgtgtgtgagtgtgtgtctgtgtatatgtaagtgtatgtgtgtgagagtgtgtgagtgtgtgtttgtgtgtgtgtgtgtgagagagagagagtatgtctgtgtctgtgtgtgtatgtatgagagtgtgtctgtgagtgatatgtgtgtgagtgtgtgtaaatgtgtgtatgtgtgaatgtgtgtgtgtatgtgtgtgtgcgtgaatgtgtgcatgtacaagagtgcagataattcagaagacaaagggtattggaccctggagctggagttacaggcacttatgctgggaactaaactcagtcccctgcatgctctcagccattgaggtgtctttccagccattgcctggtgttttgaaactaactcttgctatgtagcccaggctaacctggtattctcttttattttattttattttattttattttattatttttctgtcactgttctccctcctacctcttgaccctctcaattcccccagcccacccctagtccctcactggtcattgcttttgacttggtgttttctgcaagcctttaagaaggtagacaatggagagagccctacctcttacccctcaccccccccacctctcacctgggcgctgacacagcatctgcattgactcacagctgagcaaatatctaatatcaacaactcaatcatgtaactgtagaatttttatgagtggtacacaattgcttccaactttttatatatttcaatatttcaatttgtaaggtgttgtataagtgggatgactcccctaaaacaggctgctacagaaaacccaattatagagcatcaaagagaatctcaatattaataacaaaaactcatgctattgctcttagtctctatgtatcgtattcatgtttactgttgagaagctcaagaattatgaagtataacaggtaatttagggtaaggagactttatgagtattacataaactctcctgaaccagtgggggggaaattgcataccattctgtcagaataacgtgacacttaagtacgcctattgggtttgggacagctttttaacctggtttgtaaagagacaatttaaattgctctttttaacagtgccattgagcaataaaatgaaatgtcaatacttcagaaactgaataaagttaattgttaggaattacgtcttggcagtatctgaaaatggaacacaaagtaggcttccgattatttttacacattgaactaaagggatttttgcagcccagctggctgcttttaatacttaactttcctcgatgcattaaggtctgcgaacagatgagtgccaggaaaagctcattactttgtgaactcaccatctaagggaacaggaagatttctggtcaaggcctgagaagacctgcttgactctgctcctgatgatgaaggttcctttgtgtttgttaccaagtcctaggtgttgggctttgaggacctgccatagagaagaggttccgtgttactgtgcctacaccaagagcaggggctagagccccagaaacagggccagtgcctacaagcattgcccggtattcgaactgggtgctagtaactgaacagacttcagactcacggggagaactgctcatcaactgaaggtccaggagaggaactggctgacctgacatgcgggctgcttctccaaagatcattggggaagtgaaagaaaaacagttaggataaaatttagataaagcagggtaggctgtatagagaaaagacaactaggaaacattataaagactagaaaggaagaaagaaagaacgaaagagggggaggggtggagggaggaaaggaaagggggcatgaaaagggaggaagggagggaggaaggaaggaaggaaggacggaaggaaggaaggaaggaaggaaggaaggaaggaaggaaatggcttagtacagggagcgagcatgggaaggcagcaagtcagtggaacaactctcggaaggggctttgtgggaaagaacgtatgactgctctcggtcatgctttccatgtccccaaacaccacagactccatccgaggcggctacagatgatggaaacctcataatcggggtactcacttttttggagagagcatgtttagagtattgccaaatttgtatttccctcttcatgactagagcccaaaagattctagaacctaaaaggtggcagatggcaggggaaatatgttgcaagggtggaacaccgaagcagcaaattccaagaggcagcacagagcctcctccatgatgtggttggggtggggcaaaggtttggaatgttttgaggttgagtgacataattaaggtagccactggaaacataataggacattggctccaaattactcagctgtttgttgtttgatcaaggtgaagaaacaattttatttggaattattctaaatttgatgaatttctcattgtcatggaggaaatagacagcatggttaaaataaagtgatgcccagtttcttggtgactagttgctaaattgtgtcaaaacaggatccatgaaacagctctgtttgatagtagacagtttcttatgtgaagccacctgggttgagatccaacagtgcagtgctggccagaagaccatgactgttgctttgtggggaagatatttttccattgagtttaccctggaagtgagtttcttacaaaaaaatgagtggtgtagctgtgttagagcagttgcttcccatgagcaagtcacaacccagaaatggggaaggaaggaagaagtaacaggcaggaagggaaattttcttctggtaggaacatggctaaaaaattagagtagaagtcagagaaagcacgggagtactgcctctcagaaacaggcttgactttctacctctcagagaaggttctcctttcctggggcagtgtgcagctggtatcttctagagctgtgtggaagaaaatgatcgctttatacaggcacctaaagagaccatactttacaatatttaatttgaaaatcatttccaagactggaaagttccccagaaccattttgggttttcttcgttccggtgaagactaggggaggagagaaagacaccagtaagtgcatttatttagacagccacggaaaccagacaaaggccttgtctcgtggtacagagcgaagggcaaggagagatttacgttagtaaacaaggttgatttacagttcacaaatctggactcagattcagtcattttttacttgctttataacatgaaagattgaagatcctactaagctgtggttttgtagattcccagggatgctgcacccagtcctggagcatcggttttactgagcaaatgagaagcatctcaggactccacttccagggtttgttgaagctggctctacagtacatttcatctgacagatattggtaccagggggcagttgaaaagaaaacactacaccaaaaatttttaccttccaaggagcaacaggaatcccagcacctggtatttacaggtgttcaatcattagaatccagttcccattttatatatttttaatacttttgctcatattcattcattctagtatatggtaataattggttatgaaacaactttagttaacactgaaccctgtcagtagaaaatagttcctacaggcaatagtcttctcaaaaagcagtgacatcttatatgatatttattgctactgtgttcagaatatgacttcttttgtgtctgtgacagaaactcttgatcagaatatatttctttatgttactggcttttgccacaggatgtgaacatattgtactgttaaaattggttctgatacttaggttgtactgagcaaatgaacagaaccccaggtttctgggttgccttgtctctgcactgccagtgcacagttactcagaaatcatgcaaatagcaacctcacaatggaggacctggtgtccacacaggaggatgtctgtgtatggcagctgttggcagcttctcactagttctgaagtgtgcatgatttttgaagcattcccttcaaggtgggcaatgagtgcgtttctctgagtcactcctttccaagcacaagggtagatgttgccttatagcacgtttggggaaacaaagggttacaccttcgactttcaaggagtctgcctcatccatgatgggagccaatggagtgataaatactcctgtgaacaactaagactcgtgtaacatttctaaattgtaaacatccaaaagagatgtagagttgcccttcttggtacactgtcaatgaggcagtataggaaacttaccctgaaaaggataaaatatggcaagtgcttgttttaaaatacattgttgcagttctaagagcattcctagtgttactccggaagaagcagaaggcttgggctttggaccactgctacagaggcaagcagccagggccctttctgtgatgctttgctgcctcgaaaaacctgggattctaagcaaatgtctccagctgtcaagaagatgtttggttttctaaaatggtgcatcccataagggcagtgtattagctaggtttcttgttgatgtgacaaaatacctaacaagaagcaatttaaggagggacaggtttttctttgatctcctttgagggtggggccagcacagcagcagggctgtgtaaggcagctggtcacattgctcccacagtcagggagcacagagagttgcatggttgagcccatctggctttgtcctctactttgtatttagactgtgcccaaaggcccctcccctataggatggttccaccgaattcagagtggctcttctgtgtccacttaatcctctctggaagaggcctgggagacccatcactagccagcccagatgggaaggccagagtctgccactgctcacaaggtgttatcatgccgagcagttggagctgtgaaaatgggagagggggcttgttagcagatgatacagaaggggaatctggttagaggactctagtcagctccatgactagaaacatagaaagtaggtttgaggaaacacatgttggaccttaactctgcagacctggcaaggcatgagtgcttctcacaggctgcctctgcctgtagataggaacgtaatgtcttaccctttgacctgattatgtataaagaatctgattattagtttgccattcattcacctgatttgcccagctgaccctggctgcattctgcatgcatagactcttgtgggagctgggatgcccaacaggacccagcagtcagtcctgtctcctgtcatgaagccagataagaaaattaaaccaacaattataacaagttgtaccgagagcacagcaacgagaggacagcatgtacagagtggcccaggaacaaacagatcagaatgtatgctaggtgattgggaaatggttctgtgaggctattcagttccctgtgagcaggaagtatccctgagggacagagaaacattgttctttggattgagggactggcaagtctaggaggcagagcaagttgtagccctgctcagggagctaaaagaaatatgcagagggaccctgggagcagcgctggcaaggacagctggttagagttgactcctgtggggtaggcaagccccagattgcacgagatccttggaagagttggaatgctacagaatgtctgggttgctgcatggatagtgtgtgtggtggggggggggatgctgggagattatggggtggtttgggtgaggcagcatgggggtgggggctgatgtgaggggaagtgggtctgccagggcagcaggtgattcgacatgagagcaagaacgaggagggagggggtgacaataacgtctgagcggctcagtgcccaccagtgctgagacggtgctgtcctcagacatccagacattggggagacatgaatttatggtgccttcgtgtcttccagagtgagatacccactgagcagtctgttagacactatgtgtccagggtagagctgacctggaaatgtggaccaaagaactatcagaaagtatgatcattgatgcacagaaagacatgttcatccagggaaagagagcagaccagagtccagaggaagttaggggaagatgcaatgaaatgggtgcaaagtagactgagaagcactgtcctgactgttagcatacgggagaaggctcttcagggaatgctcacactgaggagcatccatggtgaaaagcactgtcctgactgttagcacacaggagaaggctcttcagggaatgctcacactgaggagtatccatggtgagaatctctgtcctgacagcatacaggagaaggctcttcagggaatgcctacactgaggaatgtccgtggtggccgttcaggaccacagtgtggccttctgctccatcactaaatgaaatacacttctatgtctaaggaagaaggagtactgctataagaacttctttaaaaaaataaaaacaaacaaaatcaaacaaatttaatgcatgagaattcattttaattttccagaatatcataccaacatttcagacaataaaaaatttcttatacatttgatgtataagggacttttttaaagattttaattattttatgtatgtgggtattctgactgcatgtgtgtatgtgcaccatgtgagtacagtgcccacagaggtcagaagagggcagcagatctccggacctggagttatggatggttgtgtgagcaaccatgtagatgctaacaggcctgactcctttgcaagagcagcaagtgctcttaacggctgagtcatctctccagcccccaagtttgtctgtttcaccttccttctgtccttccttctttccttctttccttctttccttctttccttctttccttctttccttccttccttctctttctttctttctttctttctttctttcttcctttcatccttccttcccttcttcatcttttttttaatatagccccttcacttcttgggtgtatgattcatcagagttaagatgattctactttaggaccctggtatttgatggctaacgaatacattgtgctatagttgtataacatcaccatttttttctttctttagaaatgggaacaaatgaatcgttttcttaaggaattggaagaatttttctttcatgtgcatgctttgatttggcttttgagggactttttttcttccatattttcaaagtttaggagttatgttccctacatccagtttcataaagaatagtgaagacagacgtgattaggaaagaatgggcactgttgctggttttgatgaagagccaaaggatgtgcttttatgagttgactcattgtttcctttaggatattcaagccactcacacccactctagtaacatcaccagctgtagggcagattcccatctagtatgagtccttagcatttctccatgagatttctagtcttagaattaacaaataataaggatactcctaggcatggtatcaacactggcttcaatatatttatcaaccatagggtcttttgtattttaagaacacactcagtggggtcacacgcctttaatcctaccaattgggaggcagaggcaggcagatctctgtgagttacaggccagcctggtctacagaatgagttccagaacaaccaggactgtttcacagagaaacccaaactcacatgagtgcatccgtgtgcacactcatctcgacatgtattctcttgttttatagcaatgaatctaatgctcagtagagatgacaaatggctgcctgtgggcacacaggatgtgcttgcactctgagtcattctcctatttcccagcttgtatttctgactcctctcacttaagctgtgatgccctccagaggttgtttgtccatcactggggattctattaaaattaggaaaaatctcatgcaccagagtgggcagaaattcacacccatgccagagatcaagtacatccaaggatgagagaccagcagcttgaggacccagacaagccaaagccttcttgtagctgccgttttcctgtttggcagcgatgctcacgcacaggatttcttggcttggcaaagtcctctgtcacaagcagcctgggaggtcctggtgactttgtcaaatttgattcttgagaaaatccaggtgaaggccaaggaaagatttgtgctttctccagatcttcaggatctcttcaccttcaagttgcaatgaagacagagctgagatatttagctttctgtggagtgccagtaattgggtcctatttctgctgtagaaaggcagagtttatgtgtggctacgaataaaaggtagtagtggggctatgaagaattctgcctgaaataattctcagctagaactcagtaaaaagagctatgctcgctaacacaggtctggggggtatcgtgtcataccctggatgtgtatgtagtgtgtgcatgatcactgttattcttttaggaaacctgctttattagattgttgtagcactatatagaggagagtctagttttatcattaagccaagagaatattatactaaagcagagaggttgagaaacacagatctgtagtgaccaactggcagagtgaggatttgtacttggggtttggttcccttgtagaatcagaccaaaagtgtaaaaagatctgtgtctgtgcttccagttgcagtaacaatggggaaaatttagcaaagaatgtggcccagccagcttcactgttgcttctaaccatactcagatgtggaagaaagaaaaggccaaccaattactaaagactacacacagcaccatcctgttagtgacttcacaacttgctgtggcatccgtgacaagatgcctgaagaaacagctgaaggaaagaagggaggaaagaaaaaggaaggtagaaaaaacagaagggggaaggaaggaagaaaaatggaagggggaaggaggaagggagaggaagggggccacaattcaatgggatacataccatggcggggcaggcatggcagcaaaacagctggtcacattgcattggcatcaggaagcagagagcagacaggaagtgagggccaggctgtagaggcttgggtcccaccctagctccatctcttaaggttccacacccttcgcaaacagtgtcactatctggggaccaagtcttcaaaaccatgagcctgtgggagacatggcacatgccagccttgatgctcccatcatgctgagaaatgcgaggctgctgacaaaccacaaagggcaagcaggcactaatgaggaaagaggcccgggctgctttgaaacaaagccatttgcaaaaaacaaaaacaaaaacaaaaaaaaacaaacaaacaaacccccgcatttactaaggatattttttaagtttacaaaatatggaagaggaaaaaactaagatgagcatatctaaggaaaaagcagtagcagcatgtgggctttgtggcattagcttttatcaccaatgggtcaggtagagaggaggcaattttagtgatgtgtttgttcattcaataggcatttattgaatgtctgctacaagacatctacttagtgtcgagggtatacagagagcttatattctagctagagataatggaaagttaaccaatgaaaagattaactgttgacttttgataagccaagtgtaaattttataacaaaaaatctttttttaagatgagagagcaagagaaagagagagagagagagagagagagagagagagagagagagagagagagagagagagagagaagtaaagggagggaagtcctctaagctgcctttgggggtatgtaaataagttagatgccatatgccatatctggttgctttttttttttttttctgtttggttttggttttttgagacagggtttctctgtgtagctctgctgtcctggaactcactctgtagaccaggctggcctgaagcttatagtgatccagctacctttgcctccagagtgctggaagtaaagacatatgcccccacacccagcttcatatctgattcttgtgttcatggatagacacccatttaaacagaaaatgtagattagtttgttttctctttatattaaagtttatattaaacttctgctaggaaaagctcatcaaagagtagactaatacttactcttggttaattatgaatagtgaaacagagaaggcatattcctccataaaatcatcagtagtagaagtaatggtggaaaggattcaggtagaattgttttagtttattaataattattctcattttacaataaatttcagatttcacaccagtccaggccaggaggcatgtctgtaatcaactaaatacctggaactgaaggagacattgaatcccaggtcacaatgaggctgtgtaccgagacctttttgcaaactttttttttatttcttttagatttgttggctatgaagtaaactaagataattaacgcattagaaaacagaaactattttgtctaagaccttactaatggagttatttaatttttaagccgtaatttgtctttaaaattaagttgaagttacagagaaactagatcgtttaacttttgatgttccttttgttatttcgaaacccaagggcagtgtgtatttgtggaaaatcacttcactgtgtcagacagcaggcactctagacgtgaagatgatgtggactgtgttttcacacacagcctgggcagagggacagctggttaagacataggagcatagcatgaacggcggaaggtgatttagcactgcctgtgaggctcctagagaagcagagctgagtgactggtttctccacccatagacagtgcctattatgctttgctagcccaacagcaccctgccctagttttctttctattgctgtggtaaacaccaagaccaaaagcgatctggggaagaaagggtatggcttataccttttagtccaccatgaagggaagccaaggcaggaacctggaggcaggaactgaagcagagacgtggaggcttgttgcttactgacttgctctcatggcttgttcagtctgcttttttatagaacccaggaccacctgccagaggaggcattacccacaggggtctgggctcttccacaccaatcattagtcaagaaaatgccctatagggttgcctacaggccaatacagtaagggcattttctcaaacgaggctccctctactcagatgaccaacgactatcaaactggcaaaacccaatagctctctcctttcaaatcaggcagcaatttaatcatctgttcttagtggagagggaaccatgtgtgacagtcccctgtagggagacgtcttcgagcacgctataccttgagcgagttttagtccccacctgcaggctcacctgcacccttagcttgtgagcactgagtggcctcaggggtgaccatatgtctcatctcacttggtgcgctgccaccacagcattctcagctttccagcttagcctcttccctcaccaggggcgggcagagacagcaaacaatcgcttccttcctaaagcctatttgatttcatatccattcatgcacatactgtattttgatcaaatcctctgtttcctccccatccaccccacttttcaccccgatatcatttgcccttttgtttaaacacaccaagtccatttagtgctgcttgtatggacatgggtgtaggaccatctgctgaccatggatagcctctgtgggggcggggcagagatatccatggaagaagttgactctccccttattcaccgagcagccaccaatcactaatagctccccagccagggacagaactctatgagaccctccctgctccccagccagggacagactctatgagaccctccctgctccacgccggggtttgagctgccttgatcgtgtgctggtctcgtgcaggcagtcacagctgctgtgatttctgtgtgcaaaggccccaccatgctccacatatcctagggtgctttgggtaccctctaccccagctcttactgtctttgtgcctcctctcatgccttggaggaggggtgtgatatagatactaaaacaacacacataggaaattaaagacctcttaaatgtgtgtgtgaaaagagtccacctgccatttgccacattcagaggacatttgagcttcctgtgaggtttgtacccacctgcacattaatatctatggccaggtgcatatacctgtcagattattataaacacctttatccatccttattcaaaaatgcttggaaatttagaaattgtcaattgcttttcccatgttgagtgttaaaaacacaaatcaacagctaaagacaaagcaaaatagaacttctgttacttgcttgccaagcaagagaaccaaaataacataagccctaagtgaacacacagaaaggtgaggctaaatgcaggaaaaaacttggctagttaaggaggagattgtggagtccttcaaagattggtcccttttctattttaggatgcaaacatgcatgggtagctttcaaagacttataagtggcttgggtttgtaggtgctagaacttaggaaggtgtttagccttcagaagaaaatggtccacccttgaggtctttgtggttggtgacgttcccagcctcatgttggccaggggatcagacaaggtcaaatggcttctacaagtactcattgagaaaactgccttgaactttatggttcctcaagccaatctcagagtagacattctggttttcatctctttgctctcccacccaatgcagaaataatgtatcttcttgctcatttagacaccggaggattcctaagtgctaacacaaggttggatacaaaggtcctgcagtatttctgagctctaaacccttgattgcatcctgagctaacagcaacagtgttaccagatgctacccaagtcacctgggctaatgttccagactcttcctcagcgatgctgcttctttagcggcctgttctacatccaagtcctcagagctacaggcaaatggaagcgatagacaataccccaaagatctggggagatattaagatatttccttttatcacatttgaaatgtcttatgtgtatatgcataggtgtagcggtcagaggtcaacttcagatgttcctcatgtgacttattcattcattcattcattcatttttgaaacagtgtttcactggcccagagctctcaagctagactaggctggctggccagtaagccttaggggtccacatgcttcctactgtacctgacttagcatttgataattctatgacaggactcttgcataaaaaataagtgtgtctagagccttagaattataattttatttctcatgtttatgttcatagtaatttagagccctttctataggaatttgactcttcttctgtctgcatggctgccaatcacaggcactgtcagaatagatagcttctcaataaatcccccaaaggaaacaagaactatacaagatgtcgctcctgtgttgacggcttcctttctcttcttggcctctatgctccaggtgggagagttcagagcacatgccgctgaatggacagccaacgtcacagctgagttcaaggaaacaaggagacggctgagcgtggagatctacgacaagttccagcgtgccacgtccgtgaagaggaagctctctgcggagctggcagggaaccacagccaggaactgactccttgtaggaggaccctgtcggtgaaccacctcaccagcgagagggaagtcttacctcccttgctgaaggccgagagcatctatctgaatggcctgacccctcagtgtgctggtgaagagatagctgtcattgagaacatgaagtagctctctttgggaagaatctgaggtgtagccgtaggggagggcttctctaggctctttgtgactgttgccggtagcatttaaacattgtgcatgctgagctcaaagggaaagcaaatacatacacccatctggtcaccttacatccagggagtgtggagtcctgaggcggcactctgaggaggcttgtgagctgtccgctgagtggcgagtgatggacaggcagtgtctgatgccttttcgtgcccagactgttcctctccccctctttcctaacgtgccataaggcctctgaaggaatcggaatgctttggtagtcatgtagcttggagggatcggcccctgacttttcaggggtcacctaactgagcctggatatggaccacttagggatgacaacatttctttttgtaaatggcaagaaattcttatgcagccttttacctaagaaattttctgtcagtgccttaactttatgaagaaacaggaccctctctagtgggtttgtggtttcccctccctacccccgccctaggctgacctctgccaattcttattctcccctccccttcacttactgtacctggccggaagcaatgtgtagcttgatggaagaaacagatgtcaaacacgggcacagaagcaacactcaggagctctggcgtcacaaggcaccgcagagaagggaggtcagagaagaccctctgagtatttatttgactggggtaccaatggtacatctatctatatatatgtacagagtaataattaccaggccggtaacatcggctgcttctatacagcccccccgcttcctggcagtatttggagtttatcatttattaaaaactagtcattttttcaaaggcagaagaagtgagcacatacgtctatgatctaagtggtgtaagagaaggaagccatctcaactggtatcacagttggtatgaattcattcttatgaagccatgtatgtgtatttgctagcttggaatagcccgtgaggcataggaggctaacacccttttcttttcttgagtggttcttgccaaattgtagggtggggtgatgcccaggaagaggggatacagccccagccacctggggtccctctgcagaggtgactgggtgtgagcacagactctggcctgggaccactgtgacttttgcacatggaatggtgcagactgccaacctatgtcatctctactagtagagaaaatgctgggtagcacaatttacatctccagaattattttttgagataagagaaaggctaataatccatttaatttaaatgtatatcctataattcttttggatgtttcaagattcagaaaaaaatttcaatacctgcatcttgtaaactgctaccctttcttttattttcatacttacatctactgtacactgtatatataatttttaaagtgcagaaggaaagtgattcctctacatgtaattacaaaactgatttcttttccttttgggggagggatgggcatatgtgaacaagtggcattcagattaaagtcttaagaaataaacccaggatctttaaaaaaaactaaaagattcatattttccaaatttgaatttaagctagaaatgtaaatatccagttagcttgcagagagtacttttataaacccacgaaagttctaaccaaaattttagcaagtcaggctcctttacaaagacagctagaccacccattcccttggtaaccgttttgaaagctgatatatggtgggatgcgccacataaaaactgtgaaccagatggacaaataaagtttgtaattaaagccagagtttcccgtttgttgtgagaacttcagtctaattcaagcctaacggaactgaggggtgatggttttcctgctcggtcattgccatctcttccttcacagtagccaagaaatggcttggggtggtcttgttggtggttgaacctggggccttgcacatgcgcacatagtagacaaaggaccacagtgctgatgtttacttggtttttaggacagagtagcccaggctggctcccggggtgtgattcttccactccaccttggagtgcaggggctctagtcatatgctactatgtctgttcctctgtaatagtcatgatgcttaatactgccctcttaaatacatgcacggtaatctgtggagggtgttgacccagagcaaatgacagcagtgtttggaagactgcttgtaatgcttgtgtcgtatcatcaacttccagattgtttctaccatgtcttgatgcatgcttaagtcactttatcactgttagaatgtaccttgacactgacatagtctgacaaatgagcaaagacaagcaaccgttgtttgtagaaaataatcgtcaaatatctgggtagtattaaagcttaaggaaggcagctgcctgccaactaatcttctagactttatgccccaaatattgactgcttaccatttttccttttcccttttttttcctttttgcagtactgggaactaagtctagggccttgagcatgctaggtaagtgctctgccctggaaccacagccccagccccctttctgtcttcccatgggcttacactagcttgcctagaggagctacagaagtgcaacaccaagcacagaggcacagattcactctgtgtacatatctgaaaactggtcccgacacctgtgggctgaatataaaattcccctacagttgcatgttgtgaacccgggctccccacctggtgacgctgcttgcgaaggctgtgggacctttagggggttgaggtacatcactggtcatgggggataggcttcagggtttatagtctgggcccacttcttgctgctctgtttcctgagtgaggatgaaatgtgaccagattgcttcctgtgcctggtgccaggcctctctcatttgttgccaggtcttcctaccacgatggaatccaccactctggaactgtaagccaaacaaaccttttctcccttaaatttcttttggcaggggttattttacaacataaaagaagcaagtacatgacatcacctctagattggggagattttaccatggcttgagtattacacctgttgagatcatttttttttcatctttcccaagctttgattttatttaattcttttatgaatactactgattagaattttgatgtaacgtattttctatcgaggtggttttcttctggatcagtgacaggagcatgcattctgtcttggagaatatttggaaaaagaaatttagtactgaaatgaaggtcagaaattcccaggtcctcattctcagacctaggtggcaggggcaatgccctttgtctaaggctttggtgactaaatgagaatgattcctttggaaaattttagtcatgctccatagtttatgccacgtgtgcttttttatggttctctcttttaatgcagtaaaatgtgaaatttctgaagctcaaagggactcaaatatgtctctcagcctctggggaaagaaaaggtgaggagtgatctgtgtgaccttgcatctttctcagattcttagaaacagatgggatagaaaggagatcaagtctcaccgaattctgtgtcacagatcaatccatggactgatttgatccttgaggtcagatgtctaaaaagatttcagggagttttggatgaaaagcccaaactcgtctagatgttccggggatttgagctagctatgcattgctcagtttggggttttatttttctcatttctttacgtttttgctcttctcataaagttcatgctatatttatggttttcatttcttattaaagtgggagtataagtttgtgggggttatataaagatgtctgtttgagtccctgaattattaatattatcagtattggtttgtgctagcatgaacacatgttcactgaaatattatttatagtggcattactgacctgaatgtgctcaggtatcacctccagtagagtgtggcagtatctgtctcccttgtggggacttcagactaggacacccattgctactttacaatgggagttgtcataaggcccactttcctctgtcacccacaccccagctcaaacacttctgtctctttcataatacatctccacataaaacacaactgtaccctcctgaaagatggaagtctttgttgggcattggtggtgcacgcctttaatcccaagcagagggaggcagagacaggcagatttctgtaagttcgaggccagcctggtctccagagagagtgccaggataggctccaaagctacacagagaaaccctgtctcgaaaaaaaaaaaaatacggaagtcttaagcacacaacgttcaaatccagctgatgtctgcaagccgcagctcactgagaggcttgtcatttgcctgtcactgcacatttattcccatcaataagggctttattattctcatttcctacttttgatccctggtgcctgctatcgaaacctttcaattattatttaattttgtaagtctgtctaggaataagcctctactactaataagtgaatgccttttattggtattagctgaatgcacacctaatatccttgccaaacaaaactcgattttttttttatttttaagtaactgtataagccatctggaagtgaacccagtatttgtcacatttgagctatttccaatagggagtattggtcacttgccaggtagaatttttaaattaactccgaataaatatttctcactcagtaatggctgactgttgtaggtggtgttcctcttttgcattatacattaagagacactaatatgtcaatcatttttgtactgtctactttgcttaaacaccaagttagaccttcaagtcatattaacatgagacttatgtttctggagtttattaaacatttttaaacaagcatcagtaagtgacaattcctggcccaggttaaaatataatcagtaactaagtgtttcatatttgggacaatgttacatgaagattctatccacgaatctgatgaagccactttgcttcttgtcaggtaggagtttgcttgcacatgaacaaagctgattctggcattaccaaggtctccaagcaggttagccaaatgcattcatctccctcatgatgacagtgtgtgtgcaagaaatagtgactacctaattctgaaaaacaaaaaactgtcaagagatccttgcataacacagaccattgcttgagctctggttcacaggcaagactccatgaaccaggagagggaaactgatacacacagaatgctccctcagctgcccatggttcccatagggttgacctaaaagtgctaccccagagtcctcttgatcaggactgtggctttggaaccagtggaataagagtacccttcaagtcaccatggcttgaaatctgtacactgccttggccatgggcaactttaataaccaagaaaattggtcagacagtgatataccctcttcttgccatggggctgttagttgtgaatttgagaggctatgtcctatgaacaactaactagctgttagtgttgaatttaagaggcaagtgtcctaggaatacatgtccccaaagccccgtatacctgctgggttatgtaaatgttctctgagccttttcccatgtgcttctctgaagaagacagctgcaatgatggagtatccctgaaaaagtctcaaatgcatctaaattcaagtagtgattttcttcagcaaaatgaggcccttgaagttttagtagagggagaggaaacccatttcctattaatttatggatgctttccccatgataggctgggttgtggaaaagctgagatattacagccattgctttcacagctgagctacagaacatgaccaacatcattttcatgagttattttgatgaagtctccttagcagaaagatatttatttcaccagattctgataagatatcctgtcagttcagtgcagccatcgcctctgcacatgcagggacttacacaaaggctcagaatgtggacaggtttgtaccgaggcaccagcattgcccaggagggctgtaaggaatgtctgctgaccactttggaattgttcagcagggacagatccatgtcctcactgatgtgactataaagtgccgaagctccatgccagctgttccccaaggtgtttaatgaaccatcaccttcaagatgttttgtgatttgatttttttaaaaacaaattacttcttaaatatcataagcaattcagtggattacagttcactgccacaatgaaacaccatgactaagggaccttaccaaaggaagaatttattttggcatacagtcccagatggagaggccataatgacatggaaggcacagtggcaagtttcaggtaggaagctgagagacacagatggagtggaagagagtgaactggaagtagagaggggctatgaattaattctcaaggcccaccccctgtgacagagttctgcaaggcccctcctcctaaaggtcccataacctccacaaacagaaccactgtgcaggaaccaagggttcatatacatgtgactatggggacatttttcatgtaaagcacctgccaatgagcaacctaattagaaacagcatgaagagtgttaatttccaccaagacgaagttaacttaaaacagaccttctggggatcatgagacttggctgagtggtgtgactctgagacttactgggtttgtggtgtgactctgagacttactgggtttgtggtgtgactctgagacttactgggtttgtggtgtgactctgagacttgatgggtttgtggtgaggctcttggtcaccattttaaggcttgcctgggcacaagactctgccccaaagatggtgtttcatgtgtctgtagaaaggaggtctaagtgaacctatctcttggcatgtctgaggagcctcatagcatggcaacgagcatcccaacaaatgatctgagaaagagagcaagcagagagccacagagctatctatggtttgtatttattatcacacatagccagtttcacttaagatgtatttattaaaagtgaaccatgaggtcaagctgtattcaaaggggggagaagttgacatcatatgcaaaccattaaatacttgcactgtataaggcaacacctagggaaaaatcacatttgattatagatgttgatacaaataaaattatttttgatatatcactactcagataactcctaacccttctccgttccttaaaaatgcaaatcttgcaaaaaagaaagaaaactatcaaataggatatatttgtttctcataaataaaatatgttccaccatgataaatactccaatgtgcctagattaactaccctgttgctttgttaccaggaagaatgtttgtagaggaatactattttaatgtctataatcccatttttcagtataaaaggaagagtgtattctcagtcctacgagaactgggagagactgtatcacacatgcagtttaaattataacaaagctttataatccaactagctgacaccacacttccatttctaggtgagcatgtaattcagaaagaataaggacacctggctgagccctgattggatggggctgctggcttggttagggcacagtgggtgtgacagaaaagaaatgcccctatttgtaaagagcaacctcttcttcatgggtacagggtggacagttttgaaatttatttcacgtgtttgctctaaataattaacaaaggaggtgtgggaaaatgtggatagctcagtaaaaactatgtcatagcattatagaagacagaagcatcaactcttatatgtgtgtatatatgtacttatatatcacttagactgtttaatattcctttttctctacttttttatattttatactgtttaagttcagaggctaatgcatggcaagcattctactactaagccttttccccagacactatacaatattttaaagactataaatttctcaccagataattccatgaatctaacataccatgtcacatcgaagaattatgagtaccttactacgcccccccagcccctcattcccatttatttgaaaaacaaaattaaaatgtcattttactggagggacagagcactaagtacaaagataaatggtatttaaaacatataatatccggctagagagatggcccagcagttaataatgtttgccgctcttgcagaagacctgagtctcagcatcccctttaggggctcacaaacacctgtaactcctcatccaaggggtccagtgctctcttctagactccatggacacctctaatcacacatacataactccccctcacacatatacataatcaaaaataataaagtatctatcaaaatataatatcaaaaataataaagaatctactatctgttttgaaataacaattagtgtttttaagaagaatttcattcagagacatacaacaagagcacagattgtcataaataagtgtcagcccatggggtcacaaaggaaaggttcactggccttcacgctcacagaagactgcatggagcagacggtgggtatgacacgatcagtaatggccatgtaattttgacatcaggagaaagaaagccttgctcaaatcctcttgattctttccttcttttcctccatattcatgggtcacgtcacccagtgtgtctctaaactagatagcatgtcgctgtctgggttcaccaagacacaatgattaaaacagagttaggtaggtaagagacttgaattaatgtcacagaccaacccccccaaaagtaccacaaaatgatgggcttcaagcaagttctctctcatattctggagtctttgtgtctgaatgaaagtggcagggccacagtggtggtcggcgttgtgaggttgacagaattgagaatcatctgggagaagggcctctgggcatgcctttgagggattaccttagttatgttaacagagatgagaagacccttccactgtgggtggacacttagatgatgcagacaaagagaaccgagcagcagtgtgtattcatcacttctgctgcctgagtgtgggtgcaatgtgaacagtggctgcaagcccctgccacctcggcccctgccacctcggcccctgctaccttggctcccctgccaccttggctcccctgccaccttggctcccctgacatgatgacctgtaccatgaactgtgagcccaaataagtcctgtctcctttagctcgccttagccagggcattttactatagtagagagaaaggaactggggcagtcatgcttcctgcacagcctctgtgaaaggtcttttctcatctcttccagctccagaagccttgggaatcccatcagaactctgatatctgattctctcttcggatcagagccatcttccagctctgttcccaaatctccctcctgctatgaggacagcagttatcctggattatggttccaaactaatggtgctatcttaattttcattatgtctccaatctccaaataaggttgcatttgcagataagccaggtttagaacatcaacatatatttctgcaagacacaattcagttaatcacaagacttataacacagagggcaagagaagaggagagaaagccctctccacagagagcccccatgatgtggtgtaaattagacacccagaaaggagaaaatgaaagaagaggtaggaagaattgcagatggcaacagctctgagagttacatccaggctgatgaggactctaaagccagaatttaccaataaatggactggggttgaagcatagaagaaatgacctagttctgctagtcccactacatccaatgttagcttgcagaagcatgaccagaatggaagctgggcctgccaattagtgtgctccctaagaagtctgtaagagggagatctgagcagaacatggtctacctcccatacatccagacagtaactccctgtggttcttgtctctttaatccactatttatgttagattcccctcaaggaggtccatacctttcttgaaaaatggttctaacgtttattcctggaggtccaaagtcctgctaatatggattgctgcttgtggccaaccctggttaggtttgtggtagtgtcaggtgacataccaagacgtcacccgagttccacagtgtttcactgctccattacataagagtgatcctatcgttctcttgcttaccagagtacattaccaatgccatattgctgtctcctgttcttacctgctggaacttgaaactacaaagttcaaagtgccctaatgccaagcaaagcttgatggaatgctttcagtacacatgtaagagcctatgtgacgtctactttgggagctgtggtgtgcaatgtgcagaaggctttccaaatgagtcatgtggcatgatagaaaatggagccatgtttcccagttttggttcctagattcatatatcctgattagggcacagcgctccctgggaagtctataagaggggaatctgagcagagtacagcctacctcccacacacccaatatgcattgattaaatgcatatcatccagccagctggatggcatctcattcttgaaaaatatactcccaaggaagctgtatttccaatattattaaaacacgtataaagtcagctgtgtctgaatttcaggatgtgttgtataagtggctcccagtgtaagtgtagcagcagagatggaaagggaccctggcagttgggagccaaggaatagcacaaagtcactgtaagcatagcagcttacaaccttgcttcaggaaaggtttccccattgcacagtataacaactctgccccagcagtgtctgatccaacagacttgtctggtttgtgcttgaaaggaggagtgcagattgaggaaagaaacagactagagacaagagatatgagtcacagtaaatactgtgatcagccctaagtttctttctccaagatcttaaataccccaatcaaaatgggggaaggcaaaaagagttccttaccatgatacaaggaacaaacaaatgttattaattacctccttagcacccaaaacatcaaatcaccccaggaaagtattactacgctctactttactctgccaaagttgttaacaactgggctctgctcctgagaaacatgtcacaatgcacaacaagcttcactcacgaaatgtattggagaggaaaaatacaggtgggtggctgcctctagggtgaagcagcagcaaactgaacagggcacagagcttatggagggtttccggggcgggagtggggttgggaggcagagctttccagggtggcttgggattggtgggcttttgtagcctgattctagagcaagctcggggataggtagaattttgtactgaggcatctcagggattggtggggtttcaagcactggttctggggtcaggatcagggcgtttttttccttggccctttttcccctatatcctgagtcataagcacaggccactcccacatcccctccccgtgaagtacatcctgtggttaatggcatggtattgagcattgcatccatgtatgtctagcattccttggatccctggagaatgctacttgttgaagatttggatgtaccaaagccagatgtatgctcagaagacatctagttgggcacactgctggtgtctggggaatgacatggcaggaaatgaatctaatcaacctgaatccgagtgagtaaccggatttcatggaggacgctgccagtttcactgcgagcagctccatctctccagagcagatatagttaaataggccacttaaaagtgagaatgcattcgttaaaagtgggtagaggggctgaagagatggctcagtgacaaagttattgctcttgcagaggatctgggttcgattctcagcatcccgttaggcagctcacaaccacctgtaactccagttgtgggtggatcttacttcctaaggcagttgtacctgtgaggtccacataaacacatgcaggaacacatacatacatgtaaccaactcaactttagaatcaatcaagctgttgtttttcaacaggagttgcctgactcctctatactcacagcctaatagactcatgacctggaaggaaagatatgtatatgaagattctccagctaaaaatgagtgatccattggtaaacatagttctattggtcacctatgccctcattcttagacaaccccagactcacccagtcttatcttgactgtaccttcatcctaatgccaaatggattcatgcctgaccccctgtaactagaagtgaatttgtgtcaaagagaatgctttgttacgacctgaggggagaactgggataaaaattgaaatcttcactgcagctagttttgagacaccctgaggcggtggttctttgattttcattctatgtacaagttgtcatgaaatattaattatgacttcaatgagaggatcatggtaccacaggcaagaggtcatcactgcagcgtgatgcagagatgaaagtcagaaggacatctcctccttaaagcaatattacatataagagaaaacacatggcacaggtgcctcactttcttttgaatttttattgcatttgagagaaacagacagacagacagacagacagacagacagacagagagacagagagggaagaagggagggaaccagggagaatggccacagtacatgtgtggaggtcagagaacaaacttaaccagagtcggttttcttccatggggtggatcccagagatcgcctgtacaagatgaccatagtccctacagaatcacactcactttgtttgcatctatttttgtgatgtctctgtaattccttctagggttttgcttatgctattgcgaagcatttcttcatgaagaccaatcgacttgctactcatttttggagacgggggtggactccagagactaggttactaaataagaaataaaaagctaaacatgacagaagtgactcagagataaggaagcttctgaattagcctgggggtgctggtgagtgtgagccaaataagccaggcaatcttccgttgctttttaaatacatatgcattcctaacatctcttaaatgagattagatgtaatcatctaagtaagtttgtgtgattgcactgtgtccagtcacattgacttagaagccatgcttcttcctccagtcaattaaagggaatgagaagaggttgctaaataacatctccccaggaatgagtgaaggctgtgcaggacaacacagcctagaagactagtaattgcatatctattgccactgttaatgttttttccctaaaggatgtgacttgtaaaagtgtcttcagaagtaaattgtattttctaaagactcataaatattacctaagagtttatagcctcctctcctctatgcaactatctccaaggattaagtaattaaaaaagggatgaagaaaaccttcaaatacaaaatgttttcagcatgtgtgatgcttagctctcactgacagctggccacagcctaggctcactggagaggagtctcactgaggggctccctaaaccagtggttctcaacctatctgacactgtgtccctttaatacagctccccgtatcgtggtgacatccccccaaccataaaatgattttcattgctacttcataactgtaattaattatgctgctgttgtaaattgtaaatatctgatatgcaggacatccaatatatgactccaaagggggtcaagacccatgggttgagaaccactggcttattatatcatgttggcctgggagtgagagtgtttatgaatgatcttgctgatgctaattgatatagaaagtcccagcaccatcctcggacagcgtgtccccaactgcacaggagcagagagtgagctgagcacatggggtaaggcatacatttgttctttctctgctcttggaggcctcgagttcctgccttttcatcccttgcaatgataggctgcaactggccacagtaagccaaataagttcttttctcacctaagttcctttttgttggggtatgtcatcatagcaatgaacctagaaaatgtgttaattgtgtcccaactttcccacggatgattagatagctgggaccagtggagtcacatgcttggcaagaacatgaagttcttgggattttcctcccttctggaagatggtcttcactcaggcgagtgtaaacagctacagacatgttcctgagtgcacataaacaaacttcttggtgggcgtggtcacactaattagtgccttctcccattttctgctgctgtccctgctctcaggtgacaagccatccctggtggctgtgtagcttcatctgccaccgttagtgtcaagatggctgacaatgaaggcaattttgctgtatgtcccaatactgggatgctaacttttgtttgtagtcctttgccccgatacaaaaatgagtctccatgggcaacctgtgtgtttgaagtcagtgtcagtgtgtactgacactcactgcccatttctggtcccagcgcttcactgctggggctctattccaaccttgattttgtccatcaagatacccagacttaattgcatttccatcaaggttcaaagctaaattcccattacatttttattagcaccaattgtaaataattggcattcttggcaaattataacagaaaaatgtaatgaaatatgatttgtctctaaaacattgagattttaaatgttgcaaatatataaaaaaaaccagaaatgagtacagattcactctgtctgatgtcaatgatcattgtgtgtgtgtgtgtgtgtgtgtgtgtgtgtgtgcatgagctgactacagaatcattgttagaagagtagtgttctgctaacaaggcattatattgttgcatggccatcatttaggaacctcacatgatatacatagctatgataagtgtatgtgaaaaacagtcaagtattaggatatacactttcccaaaattatggtgtaaagagaaacatgtatagtaacctactaacactttgaatatgtttaccttttatttatttttaaattaattttgtgtgtgggtgtgcagacgtgtgccactgcacaagcgtaaaagtctgagaacaagctgcagggttgtttctctaccacaccatgtgggtcccagggatcaaggattacctccaacactgctgatatttcatgaccattttttaatattgccccatgtcagcaagagtctacctcagtgtttctattactgtgagaaaatgccatgactaaaagcaacttggggagcagagaattgaactcatcttagagctttcagattcagtgttgaactctgagaccatcttgtcttctccctccagttctagctcttcactgtcaaccatgttgaagtttactgctgtagctaaagcatatatgccaaaatagtctctcgtccctgcatctcactgtgacctcatcccagtccccacacccagatacagcttggctgcagctgtggggaaaagataaaaccattcctggattctgatatgttggaggccagaataggtaggtacttgggctgctacaaattatgaatggactaattcgaaattgaaagttcattgatgaaacatctatgtgaattacctgtgtcttccacaggacatctatctaaactctttattttatgcatgtataaggcttacccatgataacttagcaaactaatgtcataccagtttctttgactgacagatacttctgaaccctaatgggctagaagaggcctcttaagatattgaatcataattacacatcaacacaatttgaggacatagggttcatactagaaaaagttccgtgtctttacataaactgacatccacaccctccagttggcaagaactaatcatttcctaaatcagaacatatatactatgtctgaaatgctaacatttgaacaatgcacattaaattaaattatttcctttagttgaagaaatggtcctcatgacaatctttgctgaaatttctcacactggatattgcaaggaaaataggttcctagattgactcttgaactactcctataagaatagtgtgtggcctcatcttggttctagtccttttcctgtcatggctagatgtgcaatgacaactttccccagcttatgatcacaccctgggacagaataatctaagttacaagttgctgttaccattcagccttcaaagctaaggtgtcttctttagtaatctcctgatccctgggcagccataacccgtggtggaaagtgggaacagacatggatcagaccaaaaagagggcagctgagacaatcagaggtgacaagtgaccgtggctcctgccaccttctagagggccaatgttcagttgactctagaccagacagagtcaccctcttgtcagcctcctttcacaccagcagggtccttcctttccagcctgtgagaagaaaagccagcataccctgaccatcaatacattaatatttgagaccgcaggtgttgaggtcttcattccatgctgagaagtgtttccctccatggagactggaaaccccttggtgagtcttaattgttattcttctctggaaggactggagaccagcatgctggcacactgacaagtggagtatttgttcctctggtttcccatgcagttgctatttatgtgtctccaaggcagttccaactgcagtgtctcacaagcaaattagaagtagattcaggaaagaatgaaggcccagttggacccaagtggtcaatggactgagaataaacttgagccaaaacaagacagactagagatttttaatttccactgaataaaggtggaagacaattcaggtttgcttattgaaatacagtttgctccaattatacacatcacagtgaaatggttagtctccatggtgagtagaaaagttactaagggaaagaaagcttgaatttgaaatcctgtgttcctagcagagtctaacctggccacttgtactaatataggttaacaactctatagaaaataaattttaattgttattcttctagtagttcaatttataatgcaaattaaaactatcttctatgatgttgatgctcattgtccaagattcatgtagtagagagtgaattccccaaatttaatattctttccaaagtttttcaaactaattttacagcattttcagaccaggttcctggctttcccaagctcactcgtttggccagctttataaatgtgtgatatccaaggagtgcctgggatgtgcctgtttctgcctgtacatggggaagctctgcatcttattgggcgtttatgtattaggcaccaccaggagctgtgcaaatgctgacatttaaccatcccaagagtccaaggggtcaggttgtattaatttcctcttacatataaggaaacagtctcttagccattccaagtaatgcactacgatggtacttgtcacaagtgagagtggtctataaagttcacccatcttttactgatgtctcaaccaaatatcaagcttgaggattgtctgagctcacacttagcttgctgtttacctgctagttggctaatatagatttttgatgctgcattaattgtgcatgtatatttttttcaatttatctaaaatgtggacctttcagcgtcacagtttgacataggatgacatatcaacagtacaggtttagttcaggtcttctcaaggttctctgtggaggtccatttggtagttttctatgctgtttactatagatgatctacaaaggcttgcaggcagccttcaaggcctcatcatgctgagatctacccaccctggttttcttatttacatttgagttagagttcaacaatgtaccaggaatgacttagtctaatgactaagaatgagtctggggaactggagcagtagctagcttcaaatgctctgtgcctggggatattttctacagttggtaacttgggggaatgcttggggctagagaatagattataagctcctctaaatttaagacaagccatcatggtgtttttccttgggtttgttctaagtaaccatttttggtagtaactatagtaaccttagatgaaatacagttgtttttttttttaaaaaaagaatatactctttttaaattattttattctatttcattttatgtgtatagatgttacatctgcatgtgtgcctgtgttccatgtgtatatctggtgcccacagagaccagaaaaggacatcagatttcctaggactggagatacaattaagagccttcatgtgggtaatgggaattgaacccagggcctatggaagaatggccactgctgtaaactcctactatctctattgcctggcagtacagctttaggccaaatgtatagtgtgtttggaacagggaaatgtgcataaaattccctttgtgatgttgtttttctctttattaataagttatttgttaaaggaactatggggaaatgtttcctggggagaattaataatagatagcaagttctttcccagactccttccatagcatgcaatttcccaggaactgaaagcctgccataggagggtctccctcatgggaagtccccagtttggtctccgtggacagtgttaaaaatacagcatgactctcgccactgttgttttcttaaaataccacttgaagagaaaggaaatggattgtatatatttatcccatgtttgaatgcatgattataacttaatctaaaatcattcaaagttagacattaaatagacattcaaaatgaactattatgctctatcctagcattacagcttttccttaattgaatgcattcacaaataatcactcatttgcagcattttggtggccctcagcgattttattgttggtgtgttctcagacacccggatttccagacagattctcttttgctaactatgtttagcctgaacgtgagtctggaaaatgagctatcgattgcccccttcattcatctttaatttgtttatgtttactgtcaccagaggcatctgtgtctttaaggctagtcactctcagctggttgttttctgcagtaccaggagccctgagtgctggccagcctgaactgaaaacagtcaggtcttcactacagccttgtgtgaaaggaaggacatgacagggatttcacacaatgccatgcagcaaagctctgcaaatccttcccagacacagagttcttcaaatctctgtcaatttcagacagcttctccaaccccactctctcctgatgtcaccagtgtggtttctctgcttctctggttttccttttagcagttcctcaccagtcctaccggcacacagagcaggcttccgaaggctttgcatggctaggcatcctcaggaaacaaggatgcatgcacagagagagacaatgtgagtgaacaagctaagaaagtgcaaggtaaaaagaaatcagagatagcaagcagagaaagcccgactgcccccaggaagtcaggtgtcatgtgcacagtgctgaagagcactgccttgtcccttttcctgaggagaagttagcagccatccatgcatcccagagggagcaaaggcagcagaccaaggaaaccattctgcccaaggctagtttagtgaaccagagtttgctttggccatgttcaagtgaacagtttcttctaacagcatggtgactctgaggcacctccatcacagagtcactccagtgtgggtggtggcccacagaagctgcatctccagagctctctgcacaattttcagacacctctgctggtcggagatccctctcttcctagatgtctgtggtggtgtgaaagaaaatggtccccgtgagctcatagggagtggcactattaggaggggtggctttgttgggataggaatggcctttttggaggaagtgtgtcactgctgggctgggctttgaggtctgacacatgctgaagctaaactcagggtctcagtccacttcctgctgcctgaacaagatgtagaactctcagctagctctccagcaccaccgcggctgcttcacactgccatgtctggctgtgatgataaggactgaacctctgaagtgtaagccaccccaattaaatgttttcctttagaagagttgtggtggtcatggtgtctcttcagagcaatcgaaaccctaactgagacaaggttcttactgcttctgtaaccttggggagggactttgtgaatcttgtaacttttaggagctccctgagttgtctacctttgagcctcacatctctccctccctccaggagggaaaccctcatcaataaacaggaatcctttccaactctgctaccccctcagaacatccttcgggacactaacaagtctgctcagaaacaaatggatgaacaaaacctttcagcatcatgtgttttaactttctgtggttttaacggttattcttgtcaccttgacaatgttttctaggagatttagtatcttctaggagataagtctgatgggtctgtgagagtgtttccatactagtttaactgaggtggaacttcccaccctgaatgtggatgacatcattccaatggctgggggtctaaagaaaataaaaagaagagaaacactggagcatcacatgccactctctctacttcctgacttcgggtatgatgtgacacctgctgctatacctagagccactcttgctatgatgccttcctggccatgatggattgtacccttaatctgttgtccagagtaaatgcttcctaagtcagcgtgattttgtcaggtatgttgtttcagcagcaggaaaagtggctagtgccatgggagtgtggtcagattctcaaaactccaggaccatggattgtactttacccagcttagccgccacgctgaagttacatatcagaaagtatctaaaatcccactgcttcctgcaggtgcatgctgtttagcaaaacaaaatccacatcataagccactgtggcagaatgtggaattgtcaaggccacccaaacctctgtgggggtactcatccccataggactagagacagacatatatataatgcaaaggtatactgctggccttgtttagaaggaagcaagccactaacagtcctagcaaatcactatggaggaagcagcacctgtcctgttaatgattgctgtctcatgcctagggccatgtgtacatggacatacaagctaaaattccagcagctgggaggttgaggcaggcggaccaccggtatgaggccactgagctatattatgtgtttcaaggaagccaggaacaaaatagaaatgccctctgtcaaaaaacaagcaagcaagcacacagacattaaatatacaaggccactgtaatgggagccacaatctcatatttcaaatggttctcccagtccacaaacactatgcccacttggtaccaggagaggtatttctgtgacaggcctggccatgctgcttgttcatagactttggattaggaaagcagttgaaaactttaggtggggcttaatgggccatacaggtaggtgcatagaaaactagtgccgagggtgatatggactgttagggatccgtactagagttttcgtgggagaagaatactattggctgacatagggccattcttataatattttggtgaagaatgtgactgtgttttgcccttgctctaaaagtctgcctgaagctaaattggtgagtttaggactaatgtccttggcagaggagatttcaagacaacccagtattgactgtgccatgtggttcttagcaaccactcttattctcttctgtaaaggatcaaactgggcaaagaaaaatgtactttgatgatatcttgcttgtacaaataaagcctgtctgaagattagagggtggagctttctactagctaactatagagatctggaggtctgtacagacagataggaagtgagatgcctgggcagagagaggaaatgagatggctggatggagagaggatataattgggcagaaacaggaacttgcgctctttttcctctgggaagctaatgagatgaaggtggctttggcttgctgctccttctctctgatctctcagcattttcctctgtatctgactctgggtttttattatttggaccaattaaaaactccatttacaatgtacattttgaagagaaaaggtgatgttggagccaaggcttgtgctaaaagagataaaacattgaaagaaagcctgatgttaaattaaatggaataaaaggagtcatagcctcaaggtaagatcccacctgcctgatactgtaatctgttaaaggaaaaggccagagttatttccttagcataaacaaaaatgaaagtttatgcaaatataattaaaatgggggggtggcagattacagccctaacaagaagaagaatttggcagcttcagtcacatagtctggcttaaagtcacgaatgatacaggaaaagagttgtggaatcttcctccacagttaaagaaagccactgaagccatgtatgtggcaaaggaggcccagagaggccacggggtgaagctgtgatggagaagcctgagttgcattggaggccccaagatgttggagatgctagagtcatgggatgcctaaccaaaaaatgctgcaaagtggaaagaactcagagaagggcaagtgtgttgcagttagcaaaaccgtaagggaagagccatctaataaatcctttaacatcaaccacagagatgcagaatttggagttcaccccgctggtttccagtcttgcctttccccagtagtctccctttcttccatacgggaatggtaatatataatctgtgcctctgaatgttagaagcatgtggcctgctttttgactgatgttactgttaaaagattgtcacgagtctcagaagagactttgaactttcaaagtgttgagactgaaagactatggacagaatacattttgcgttatgatatggctacagatctgtggggcagggagtggaaggtgatggtttgaatgagagcgaacggcccccagcagttcacagacttggaggcttagtcagcagagagcagaactgtttgagaaagattgggaagtatatggccttgttgaagggcatgtgtcattgtaaggggcctttgaggtttacaaagcccgtgccaggcccactgtgtgtatgtgtgtgtgtgtgtgtgtgtgtgtgtgtgtgtgtgtgtgtatagatgtgtgtgtgtgagtgtgtgtatatgtgtgtgtatatacatgtgtgtgtatgtgtgtgtatgtgtgtgtatatatgtgtgtgtatgtgtgtgtatatatgtgtgtatatatatgtgtgtgtgtgagtgtgtatgagtgtgtttgtgtgtgtatgtgtttgtatatatatgtgtgtgcgtttgtgtgtgtgtatatatgtgtgtgtatgtgtgtgtatgtgtgtgagaggtgagtggaacaggtgcacacacatgtctatgcatatgcatttgtgtgtttcatgatatatgggtgtgcttgtgtagggaataagcatgtacaagtgctcacacacgtgtgcatgtatatatgtttgcatgtatggggataaatgtctgtaggcacacacttgtctgtgcatgtgtgtggaagacagagattgacactgtcttcctccatcgttttctaccttatatattaaggcaatgctctcatttaagctcacagctcactgcttttgcttgaatagctaccctgactcagggatcccttgcctgcatttgcctaggtctgcgattacagtcatgctgccaagcttacccagattgtttgtgggcgctgggggtctgaacgctggtcctcatacttgagtggcaagagtttttattccccgtgccatctactggctctcttggtccttttaagagtgtacagctcagcatgatccactgaagcactagagaaatctcaacattttgtagagagacagcatcaaccatttggtagcagccaatataaattttctgtattaaacatgcacaataacatttatctaccgtagatcctgagtcccgggttcgcactgtgagtgtctcagctgcttgctggttcatggagctaaatggcccctgagacaatgctgttagcctctcctagacttctccatgttttgcttgccagcattttttatgtttggcagctcctgtgttgttccacacatccatagaagcattagaaatgcccgtagtgtgatgctttgcccgatcaaaattccattcaaattaaaaccagggatgtagttttttccttcccaaaattaactttgcaactgtgttatccagatgtaggatgtctttgacagttgtttatggattgtacacaagtagagctttggaaaacagactctggctttggcagttgatagccagtgcacttgggtagatgtttctgcaacatttacaggaaatctggacatcagactgactcaaaggatggtttgtttggttcttggccaattgttgccctgataatcaccccctggcacacatacagagcaatatttctcatatcttgactttgtattatgtttaactaagatgctcaggggagtattgtggcaattcaaattacgttccctaagaacagtgtgttcaggggaggtaactgcaagtctttgcatgattctgaaatttccgtgatcaccttgcaggaaagaaggaaaatgtatgtttgccatgattgcttttgcatcggtgagtttgtagactacatcaatggtcacttaaagtcttcttgttatttctttagtttatacttccaatgagagacaatacaaattaataatcaaataggactccacactccccaaatccagcttcagaaagccagactgagtctgtatcacttaaagagaaattctaagagtgctatgagtagaggtgttactatgttggtgttttatttagtttccactgtcttagatgaaatagccattacaaagtgccatgtgtagagtaactagagaacataattattttccctcatgactctaggcaatagatatccaagagcaagatatcagcaggctatgttcttatgaatgccaccttcctgtttcttcttatagtgtcaggaaccccaggcagagggccccatctctaaagccatcatgctcagggttaaggtttcatcctgtgggtttggttggggggggcagtggctgagatcagagcagtttcatcagtgtgtgagaagcagtgttttctctcctgcttctacaagccatagtggtgtaatctctggctgtgaatgctcgtctgtgctcgtctgggatatagacacgacacagacatagatacaaagaattagatagacaatttagattgtctcacatagtgactcctttcctttgaaaacacttgaacttcagatcatgctgcttaattgtgcaccattcctttgaaagacactcaaacttctagctctcactgattcattttttcctaggtatgttagctcactagaggcttactggggcctgaatggagtctggagtaaatatgacttaatctaatgtgctagttactattttttaaatcactcatgtagcaaaaaaaaaattaccctagcaacttcaagtactaaacgtttgatctcaattgaatcaattagttaattcagcagttttattttctgttgatataacctcccccccaccccgtatattaagtgatctctgttgccataacaaatgagtcaacctggtttttgctatatttggaaatataactcaaaatgaaattttgaatattttgttaacaagattgtgtcctgtaaccccatattcacttggtgtttaaacatgtttcctcttagagcagatgctctgaccctgtgctcagtgcccaagcaacagctaacaggtggatggaaacacgggcggtgcagacggctcagaggctaagggtgctgcttcaggcctaaaaaaacctggctttggttcctggaattttcatgacaggaggagagagccaacttccacaggttgtcctcctaccagccctaccctgcaaaaaaaaaaaaaaaaaaaaaaagtaagtcctaaactttggggtgacgctttaatggtggaggcggtggtaacaatacatgagtttaacctttcagggttttatgatgcattaattctcttatcagaatagcatggttctggaatataagcttcatggaggctcttgctcaccaacaaattcccaacacctagaataagtgctggcattttcaatggtcattgaaaaatgaataaatgtatattttgtgagcacattagagaaggagctgacgaagggaccctctgaatttgcagagaaaagaagtgagggagacaacagctctgatgggtgtgagctctgcaccctgagctggcattaaaggatagtctggtagataaagcagggtaaacaacataactagacatcagttctaagacaaagaaatattccttcttttgtatgtgctgggggtgtggtctgggcattttctgtgaagacaaattggttttcgttttaaaatgaatctgtgtgagagagtcaaggatgggagggagcagttggcaaaaacaaaagatgctggttaaatgacaggtgacattttcagaagtacgatggtctatcttgaagaaagcagactcagccatcctgtttcagttggactccacttgaactattaattcattttgaagaggaaaagacacactttagactttcagagtggctatagatacatgggatctatgtgtgtgtttttctgtttggaagtataaatggtagtattggaagctggaacaaggcactgacatacaaggtctgtacaccactgattgtgagaagcactgtaagagcagatgaccagggctaagagaaggcatgcaaccccagacagccaggcagaagcctctggaggtagcctgggtgatggaaggaccatggctgacaggccctgggagaaaggaaagcaagaagccttaaaaatacattccctcactgagaatttccagcttacagaacagtagagaaggtaatagccgtaaaatagtggaaatactaccatgaagagggaagttgagattttattgttgaaagacttgtgagtggatgaagccaaccgaactaactctgaagagatagagtttcatttaagaaagaactttctagaagagaaaattgtcaagagctgtaaagcattttttaggaaatgaaaataaaagggaaagatgactttaaaggacacctggggccttggaagtgagagctaactttaatgtcctgtgttacttggggctttggaaggtagagctaactttaatgttctttcttacttaggactttgggatgaagagctaactttaatatcctttcttacttagggctggttagtgcagccagagtaaacagtttagtttgggctttccccattttatcttaaagatgaacatcctttaggtatatgtggactatatttatccttaagtcccacatgcgccacgcagaagacagtggaggcttgtgaaacagctttctgggcaacagaatagagaaggacagacacaggaactagagaccacagaaaagttcatggaaaatcaatagatttacttggggacaaagtgcagagaagctagaacgtcggacaagaagaaatagtgtaaaaacagcatggaaacgaacaacagaccatagcagaaggttctggggtacacctggaaatcttaggggaattccactatcaataatatgtggattcagctactagacagcacccaggggctggagatagcacccagggactggagatagcacccagggactggagatagcacccaggggctggagatagcacccagggactggagatagcacccagggactggagatagcacccaggggctggagatagcacccagggactggagacagcacccaggggctggagatagcacccagggactggagacagcacccagggactgaagacagcatccagggactggggacaccattcagctactaagtacacctactactcttccagaggatgcaagttcagctccccaaactcacgtcaggaggcttacaaccacccacctaactccagtttggaggaggggagatccaagacctctcaccttggcaggcacttgcgcacatgtacaaacctacacacagacacacatatacagacaactaaaaaataaacaagcaagagcaggacccaggcatgagatttggaaagaaaaggcaatgggaagagagaatgtaggatgtactgtcaaacaaggtctccaggtcataggcctgtatgcttttcaactcgtgggttgcaattctgacctaattccaagtctgtggaactaagagtgccattggtagatacaagagctgctgaggaactctaagggcctagatggaaatatcctagaagtgtatgaggggtgtccaggtcatttccttactagttctctggcttttcaggaagtcaaagggcgagagggactaatccagagctggaaagagctggcatggatggaacgcctttgggctggttcactgctgtgcgtcagtaaccgctctctcccataccttcactttagctaacgctctgtggattccattatgaatctcttaaatttatattagtctttaggtgtctccactatcttcttttgctagcacagtggaagacactgtgttttctgctctagtttcccagtccccggctgtcattttgtctgagtttctttactttacactccatgtaagtttttagacaagtggaagcagatggcctggcttagtcagtgttaggtttggttttctttttggtagaagtgcttgtataggtagcattttcatttttctagaagatacaagtgtgcagatgcttctctctgcttggtgttggcaactgtctgaggctattgttgaatataagttcttatggcagatatcacttagcagaaaatgctagaatttcctggcacctaagttattgcagggaggttcgaaagctttagcaatcctctattccttaggacaaacctctgccccagaagcatttattgaatagatgatttcataatgacaatttataaaaataatctgagagcaacatgatgacagttggctgtgtaaatctttatgctatctataataattttacatgtagtagggacagttacatagattttgccttaagcaatttttcttaaatgttctttctatatcatcagttattctcccaagtcatctggcattttttctaactcctactactaacataacaagggtaaatatctgctactattatagatgattaggtgtttgtatctagctaaaggcacacttttaggttcatgtactactcggaaatgtaggtttgggcacaaacacactcacccctttttcatggttatactgttgtgactgttcacaggcaaagcatggttagcatgataagccctggaaaaacaaagctttggtttcttcatcatttgagaagtggccagggtttctaagattaaggaagcttataaatcaaacaaacaaaccccggaaactgcattgggaagcaatctcattaaaagagggtgacgcgtcattgctgcgttttaatgtctacactcctctcttgccagcattcagttagcaaaagacaaaggtgaaaatgtaggagtcaggccattcggtgaccttttggaaaggcctgtccacttcctgtaaccattgtgattcaatttctgttttaaaaaatacaaaaactaaacaaacaaaaacaacgttggttccatgaggtatgaaaagaggaaagggtctctcggaggaaaccaagcaaattaaagatagtaaattaccgtgtcgggtaaaagcccaagtaagaatcaccatgctagaatggccagatggtctggataatgcagcctatatggccagggaaagtcacagctgtttatacatgcctccgatgacagatgttcatttcgaagagaaaccttctccagtgaaccagtgagactatttaattgaagtttattatgaaagcagcagaaatttaataatagaacagagttttaaagggctctgaactctctgctcggcacgcacccgtgctcggctctccaaatgcattttttaactgtatattagttggggctaatcatcaccaaatgtgcaagtatgaattccacatacttggtctcaccaccttcattgagtcccatgtggcagagaactttccactcaaatttttttcatttatttatttagctcataaataaagtcatgcacaattatgatacagaatacagtatgttcacaatggcatggctaaattaaaccaattaacatattatatcacacatattcatcatctttgttttgagaacacttaaagtatactatctcacaacttttaaaatatagcatattgttatcaaccatatttatcatgctcttagtagacctcaagacttcagagagtccatgcctcttgtccaactgcagttttatatccttaaaccaatcgtttccccattgttaaaagttaaaagtcccacattgaagcctaatagccacaattctgctctctgttcccataagttcatcatttctaggttacacataaaattgaaattgtgtgacatttgtcttccagtgtgtcacttattttttttttggcaagcatataactttactacttactaaagatgaaatcaaatttgcatgcacaggtgagcactcactgaaacaccttggattcatcacatatttgagtttcaattagcatatatatatatatatatatatatatatatagagagagagagagagagagagagagcaataatggcaatatgttatgcattaatagcagcaacagccttttggctaagatcaagtgtagtatctattcttattagtttaatatctgatacgtcctctgtccactcaaaatttaattgcccgtatgtatgtatgtatgtatgtatgtatgtatgtatgtatgtatgtgtaggggaagctgtagccacgcctacttagggtctggctacagatgtgcctgaccacgcttgcgagggcgtggtcaggggacgtagggtgactgcgttttctctttcgtttcacttttgggcttgcgtacagaccgctgccacgctggctggctaggttgctctgtaagtaaggcttttccctattaaatatccttatatttctacctgactccgtattggtaatttcccactatatgtatgtatgtatgcatgcatgtatgtatgcatatatgtggtcaggggagacagaggtacatgtaggtatgggatacagtggggctctggattatattcatacttccaagaaataaccgatacccacaggaagatttcaacctttgctttcttttggaaataataaaaccctctcttctgcttgtggaagctgggccacatgttcttctttggaattcaccaaatccttcacaacctagagccgttccgatgtgacaaatgaggactagccctgtcctgcacataaaccccattggggatgtcagatctcaactggaatggggcttcctagagctgagaggccatccacctacattatgagcaatggtcaccgtgctgttcttacctgatcaatttcgttcttgggcaacaactttattcatctagatgccatattcaggagaagccatttgtagactaggagaaaagtaacaagctatcacttttccatgcagatacaccctactctgacacaagtctccatgtgccgtcactgttgatccccatacaacagtgtttctaattgctaatttgctatttgcaaatttgctaatttgctatttgctcctgtgtttttatttgctaatctatcttattgtgtacattgctaaccacctatcttgaaaatgttcctgttatttttctgctcattgaaaaatattttctccataaacttcattgaactggtgataaatgtttcagggaagatttacatgttgggtaattacatacacattgtctggcgagcacacatgtgggccagcagtcattttaaccaaggttcttcaagtcacacatagttagttataggtgactctttgacagtaaatgtttgcctgtagatcattaaaccatgaacaagtatctctggacactggaggtttttagtcatgaattgtcccaacttggttttttgagtccactgtatttccactgcattcagacatacagcctacaaggtaccttcccaagttctctttggccactcatagttgacttctcaggtctgagtttcttatgcagcacagcatagctacaatctttaatctcttccctatagccctcaacaatcattttttaaatttcctatgcatttgaaaggtaaaccaaatcattggtttattttttcctctttgacttgcttaaaaccaacattattaccattgtcactgaatgctcacttctagctcttattgtgtttagagagaagacttgtcattgggcctgtctttcctcagccctttgacttatctttgctgtgagatccaagtccagccacgaggcttgagactcttatcacaatgctggagcttccaagtcactggattggcttatacacaaaagacactcattcatggcacagcaacttatgtggacttcttcctcacacaggtcataggaagattctacacatggaagacatggccatagttaatactgggactaccaaccaacaggaaggcagattgtcgccaacagttttccataatcccagcaactttattgcagtcaaaatcctgtgcatccgatgataatggtttttattgtcccttagtgctttggtatttctagtttcacctggaagtcattttctccagaaagccacttggggatatctgttgctttgatgccttctagacaccaaaacacattcaaacgggaaatgctaaaatttctttccaaatcctcttgatgttttgtcaacaggatgtcaaacatctgcatccttgagatgctacagatgattgatagaattttcatttccaactgacattgtttctggcaccatgggaacatgcatcaagtttgtttgcacagtagccccaagccgcttacagaggagtaatctggtgtctgtcctcatgagctgcctgtctgataagaggaaggggatatctgctattggttatgtctctgttttgtgcccagaaaagtttgtggaagatcagtcgtgacagcaagagatgtgaagaaacataaaaggagagagagcctccgtcttgagaggcccttggaagtgcactaagaaatgtagaaacccatgaggtagctaacgaggccatatttgattctgtaaccattagcactggtcatagatgagcaccctgattggagtcagggccaccaatggcagtaaggacacaacaaaaggtctacgcagtaaccaggtgataatcagataagtgccagcagtgccaacagaggcggtgatcatttttttaaaaaagtggtcagaaaatctagttataattaaaaggggttcacagaagaaggaacagaaagggaagcagctggaagcagaagacaaatttggaggaagtaatgatcatggtgaactatgtcagatgtaaggacctaaaccatggaaatgactatgaggatggaggaagacagacgggagagcctgaagaacgagcatgcccggcaccacatagcatcttccccgaagatcaaagagaaatgaattccccaagactatggcacgttgagtcagggtaacagagagcgcactgccaacctaagaaagaagagtgtaggaattagcctccagaggatgtcactagcccttgccatggtggtggcatctctagaagctgctcttaggagttgtcctggggtgggtttgacatgcagagttggaccttagctgtgaggctgtcctggaaagtgactgcaaatgtcaagggaggaagagtgtggagtgtgaaagactcacagttgtgagagagatgctgagggagatcaggggaatagaaaattcccaagatcggtgggagtggccggtgggaatattaaattcccaaggatgatggagaggccagtgccacaggaccttagtccttgtgtctatagcaccggcccacctgtgtgacccaggcccaggactccttactacttcttgcttactgggcatgtgctgatttgggcatgcaaaggaaacagctagatctgagtgaaagattttgctgtctcaaataccagactggctctgggtcctgaaaagaagtgattttaactgttaattagattatccctagctctccatgtctctttctagttgtgatctgttcttttccttactgcttccctctctttcctcagtttatctatccactctctctctctctctctctctctctctctctctctctctctctctctctgtgtgtgtgtgtgtgtgtgtgtgtgtgtgtgtgtgtgtgtgcctttaccctcatgacttaagcaatacattgtttctctctaaccagtagcaccaccactccagaatattgcctggagctctggcattttctcttaagtggaagaaattgtctcttaagaccatagacttggttgcaaactatcctgtgtatggccagtatgttatcaacagcctctccctgcctctgacctcttctgacttccagtggacaaggctccactgatgcatttagcatgcagggttgacatcgtaattatactttctcacccaggtcctggcagacgaggtccattcaagacctcacagagaggagaggggactcagagaagatatttggcttagtgatgactgagagcctttaaagacactatggtgtggacaactgaagaaggatcacagtgaatgaagcaagaatttggttgctgtatcttcagaaaatgtcttacttatttgtattttttcactctgtaatttgataacttaaggaaagattctagaatgcaaatttcagatggagacatttaaatcattgtgacatgtgaccttgtagctgtcgcatgaccaggatgatggcaccattcaaactcccagctcaaaagctattctgacctggagtttgtgacttttcagagtcccttacattgatctacttcttacaatgcaattcctgttgatatcaaatcttccccatgtaggcccctgctgtcttatattagaaatgccaacaagaggaaactgaaacagacttgagaaaatcatttatggctatgtccagtaagcacaaatgtaattgtttcctttcgcttttagaagcacagaaatattgcaagccaggaaggacaaacttgagagcaaattcttcctcctaccttgaccattccacactctgctggtgttctagagggtaggaatttggttcctgggtcaaacctaactcaactcaatggattatgagaaagtatctcacccagaacactcagaatattagtcggggaggggagtctttgcaagtttcagttctctgtgagtacttaaaaacgtggggttgttttataaacaccccaagattggaaaaccccacaggaccactgcccaaattgatagtgtacaaaaccactaaaagtgagacacaagcgtgtgtgtgtggagcgtgatgaaagtctttttgcccagcttgggtggttaccacagatatgccgtttgtggtcgactccacagagagcatgttcttcttccttccttgaggttgcgtcttaggtcttaggttttgttcctacactttctaccttttattttaactgttttattttattttacttttctacatgttctaccttttattcacaggcctccgtagaggaaaccataccctgagataaattttggttcctttctcattgctgtaaatgattttatgggagaatgtgtgacccagatctggtcaaagagaagcaaaggaagttgaggctactgagatagatttttacaactctttttttttggctctggaaattgttggacttggatatgactcctttccaagcataaggatgtttggtctggagacaaatctggcacacactagtggaggagagaggtgttgagcccatgagacacttgatcttgaagcacactttccttgtgggtggcaatttctggagtgtcatatgtctttccttatttattttattttgtgtaggcttttagataaggtctcattctttatcccaggttggccaacaatttgagattcttctttctcagcctcctgagtagacagacatgtgaccttgcatagaacatggggcaaaaaccaagataggacaatcctagccactttgtcctgccaaaggttttgctctaaagtcctttgactttttaatccttttatttcttcactcgacaaacactatgaagccaactaagtttatgcaactgtagacatccttgaaacatccttgcagcggacacagatccaagtccttttctttgatagatgaaaacatcaaaacacagctctcacctgtattatatccttgatcccatttcttaacactttgtccctgcttgcttggctgtacctgcatggctcctctgaagaggtaggacaagctctgacatttggtggcgaagcagtactctacacattccttccttcagcctcaaagcgcgtctctcaaatgtgtgtttggattccttgctggctcattgattcaggcttctgttaagctatcatctcatctgtcactctcctcttcctcttatttgttttggttcacgttatttaatactctgcatttaaagaactattcctagccatcttggctcattgtctgtatgggttttgctttgtcatagctatgtccttaatgctatagcaactgacacacttaaaacttgaacaaaagtcagcactaatggccaaggcaggacccttcatgtgtagcagaaactcctttccagggattccagttcaaccatgaacagtaagttcaagtgtttaactctgttaggacttaagtatgaaatctcctgttgtgttgatacttgtcctagtctgggttattgttgctgtgatgaaacactatgaccaaaatcaagttggggaggaagggtttattcagcttacacttccacatcactgaaggaagtcaggacaggaactcaagcagggcaggcacctggaggcaggagctgatgcagagaccatgcaggggtgatgcctattagcttgcttcccatggcctgctcagcctgctctcctatagaacccaggaccaccagcccagggaggcactacccacaatgggtggtccctcctctatcaatcactaattaagaaaacgccctacaggcatgcccacagcctgatcttatggaggcattttctctgttgaggcctcctcttccctgatgtctctagcttgtatcaagcgggcataaaactgtccagcacagtagtacaggtaaacatggaacccaaattgtccttcccattctgacatctgatcacagtctaataataacaaaaccactgagctcagctgctgctgcactcaaagtctttgctgatgattctgattatcaatgaggaaaattccggctagtccttatttgacaccattggtaaattaatcagctcttggtagcacagaaagtgtgtgcagtggtgatggctacaggacggtagttctagtgaacaccaagaacaggaagaatagagattttccttgatgtaatgccccttggcattctggaatgtaggttgcgtgagcagcttctacacaagcaaatctagtatattttatctttgtgttgagcatgaagctggcctgaaaattggtgccaaaaccatatgtttgactctggaaaaaaaagggcattccacacattcatcaagagcccttcctggcaatctaagctaatagttttggacacatatgtgtctgtgtgatcgatagtgcagaaaccacattagttatatatagagagcagtgtaacgctggatatatttatagaaatgcctgtggaacatgcagttatttttaataagaaagacttgaagttgtttagtgcagatgcataattgtactacaaataaagtgattgatcataacacaatccacatttgcggatatcatgcagtcatttcagagtcaagtgcacacagggcatggcagacggctgaggatcactgaggatggtctgataagtgcatgcattaatctgaaaacaggcatggcagcaaaaaggcacaagggcctggtgcgtgtggagggagtagacgtgctccaaagctctctgcatttatttattctgtgctcagcagcagaagacaactgctgaatcgaattctgctcttcataaatgctagctacagataggctaaattctttggtatttttagaacactttgcatcgataaatgaacaagaaatgagataaccagctgcttgcaccctgctctgttacaaactatgtgtttgtgatgacaagtgggagtcacgtgggaggcaggcactggttatacctctgagggattatcttatttttctttttttaaattaatttattttttacatcccaatccctgttcccccttcctcctttcttcccactccctccattccctcctccatctgttccatggagagggtgaggcctcccgtaggaagtctcttaaatctgtctcattatctagttgaggcaggaccaaggcacctctccacccccacacctgtgtctaggctgggcaaggcgtctctccatatagaatgggctccactaagtcagtttgtgcattagtgttaggtcatggacccactgcccatggtctcatatatcgtcccagtcacaccattgtcacctatattaagggagtctagtttggtcttatacagactccctatttctcagacctgagtcagtgatctctccctgattctgtgtgttttcccatcatggtcttgactcctctgttcatatttttgctcctctgaggaattattttaagtaggttgattaagttagaaaacccagtctaagagtgggtgacaccaatccctggacttggggtcctggactgaataagccagctaaggcctttggctcctcactctgattttttggtgtgggtgaagtgtgagtagccactttaagttcctcttgccacacctgcttcaccatgatggacaacgagcctataaagccctgtttgtcctcaggttactttatcacaggggcagaacgctgaggcataggagtttccatgtatcatgctttcaaaaggtcttctgctttgaggtgtcatattttcaagccacaaccagacatccttccatattacccatctacaaaagacaaaaaaatggtaagaatccagagggcagactgtcactgtagactcaagacttgcatctttttggagaaggtaaactttgaattgggcccaaagcccaggcaggatgtgaaaaacacagggaagaaactccacagtggacagagatgatagatttgagatgttacagacaagtctaagactgaaggaacaggtaggggcaaggctttggtccccaaatacaagtgtgatcacactcgcttactcatttaaaatttgtgtgtgtgtgtgtgtgtgtgtgtgtgtgtgtgtgtgtgtgtggtgggtgcaacactagaatagagtgttggatcccatgtgtctaaagttatagagggttatattctccaatgtgggtgccatctccgtttaagaaaagacaacatagaagaaaacaacagggacaccaatgaaagagttttcagcttaggctttgcacagctactgaaaaagtggaatgtctcaaagctagccagagccaccctaaacttcacaggccagggctgtttgccctgactatgtcaacttgaacatgataaacaagtaagagtcatgctaacagacaaggacaaacacatgaatggaaaaacaaatcagctggagattcatacaaaatgaaatctttggaggcatcagacaagggatatgaaatgaaataactgattgacatgccatagcttaaatggaaaaagcatatagaaattgctttccactaagagagatggaaactttgagaaagactaaaaagggaaatctagaaataaacaacactgtaactgaaatgaagaatataattgatggaatccctggtctattagaccaatccaagaaggcagtgagtttggagccatgctaccagaagcgtcccaaagttaactgcaaagaaaaaaataagaacccacacccctgaacatccaagtggcaaggatttcacttttaaaaacaaagactcatatgtgcatatttatcataagtgtacatatattattttataactttctgtagacttcatgtgtacataacatacagcactcatcagaaagcaaatgtttaatgcttttacatagagtatatggacttaaatactcgtcagaacagctacataggataggtacaaatgtcctcattttacaactgtacagtttcccaggatacttagaggattgccaaagtagaggaaattaatggacagggactaaaaccagaaattcaaatgtaaaggaagtcaaagaatttgcacattgcagaactcaagtagtggcaagtgttcagtcagattgtgaaggctgagactatgaattgctgctgctgtgacccgtgttatgggctggaggacacaaaacagagtcgtccttaaacctctatgtcacaggcataattatgaacatagttatgaattacagcctgtcagccactcagcctattggagtcctcagatgcaagaccaagaaccaaggaccacacaacctgccgagaccaattggtacagactggaaacccattatattctgggtcaagctctaggccccatgggaattcccacagcactgagttggcctgatcttgccttcatggaagacacatacctgagaaagtatttccttttggtttggaacaagttgctaaggttgtaggcttgaatacatggatggctcttttcttgcaggcaaagcacaaaaccagaaactgagtgacatttcgggagcacaaaatctttgatctttagctttccagaaacatctggaatttgagttcctgttttcattgttctggatagcactcagcttcctcctgaaattaaccttcagctggacttactgcagcaagatttcagaggagcccagacacctaaggagtctgaatccctgagagcctgagcccagaggcacagtgccttgggagtgggaaggaattaccatgatgacaaagtaacatttcattattttaagccttttgtttcacttgttttctgtgctgattttaagttatttttcctagcatgaagatcgcgaaggtttccagataaatcaaaaatgctatttttaaatactgtttgattccattactgccaccagatagcttagggcaaaaatgataaggattttctaaacaagccaactttttgtatttgattttgattattttgtgtgtgtgtgtgtgtgtgtgtgtgtgtgtgtgtgtgtgtgtgtgtgtgtgtaagtatatgccacctgtgtgtgagtgcccaaagagaccagcagagggcatcagactggagtcacaggcagttgtgagcaccctaatgtaggtgcagaaaacaaacgctagaaaagcaccaagggtcctgacctctgagatgtcttcagaccctctttaaattctttgagaactctggttctgcaatgagccccttcacttatgtgaaaattccactgaccaaaggtacatcttcaaaggtagctagagtaaatcattgttctagtaagtttgtcagaacatgttggctatgtttcccaatgactcaaattatattggtgcaaaatgaaatgagatctagaagaggatcagtgcaagaaagcagtggctgttgttagtgttcaggcgtctgtactgccctgtctctgggcttctgacaggattcgccctcagctgcagcctctaagagcatcacctgtgcacattcactacgttcccttttaaaagggccccgcccacctcccatccccccctgtctctgtctctgtctctgtctctgtctctgtctctctctgtctctctctctgctcttctttactctctctcctgctgctgcagtccctagaggcctgtctcctcactcctctttcccctttttacaatccttacccctaattaaaaaaaaaatcctcttcttgaactgtgttgcatggtgtctttcactcttgagctgcttttcttaaattacaacagctgtggcatgcaccttctgtggtgattgatgctggagcctgccttcctcacgaagcacaggtatgcttttcccttcctgcccctccccccagcatctgccacactcacaattgcccttcatccttcctgtgcaccaaaattcaccctcttcctgtaccaagtctgaggcaaggtctcactctgtagcctagtctggcatgggaattatggtgacctttctgcctcagcctcttatgtgctggaattaccaacacacgccactgctctagatcttcaattcctcaacttatcacaacctccctgcttctttttcttcttcctaatgaaggaaccggcttcccttttggcagccataacagccgaacacgtgcttgccataaacctaccttggtcacgtagaggtcagatgcctgtctcgtgacaaggaacccatcagaagttagtcactagaaagtcagatgcctgtctcgtgacaaggagccaatcggaagttagctggtggcgctatgctttacgaccctgggtgtgctttacggacaagcgcacgacaatgacgtagagagcatagcaaccaccctgggagggcctatgagccataacaaccagttgaccaatcaacacagggcaagccctccaagcctggaggcacaccaatcgtgagcctgtgcgtacccctagacactccccttacgctgccctataagatcttttgggagacccaaggagccgtctttttctagccgtctgccatggcgggtgggtgaaagacccgagctaacatggggttagttcgttaaattacaataaagcctcgtgcagtttgcagcaagctctcgaatccgcctggtgattggggtgaccgcgaacctggcctgagaccccggatacttgagttttcgggggtctaacattttgggggctcgtccgcgatttgcgaccacccttcacctgagtggattcgatcttggaggtaagatgattagagctcgcaacttatatatgttcaatgttctatgtttcttgttttgtctcttgctgttttgtttggtgccatgatttgtatttgatctgcgcagaatttgtatttgtaattcggacttctggggatgaccctaaagtcctgccctggatgaatgtccgagggttgcttgatttgatctgcgcagaatttgtaatttgtatttgatctgcgcagaatttgtaattgaaccatagggtaagcagacttgcgagaaccttggttccaccctggatgaaagtccaaggtttggttgtaattttggtttggggcaccatttctttgccgcggtttgtcctgtctaatgtctgtcctgtctaatgtctccatgtctcatatttgtggcatgcatgggtcaggggtcttttcttgttgccctaagcacatggcacgggaaaggagttctgccatgtgtcacgggttagaatgtgttatgttggagtcccccgaggctgcttttctgaactcgaaccactgctgcagcccttacagctgagcctggcccatgtaggtgagtctttccctatccccacttgccggtcccatgggtccctgccatttgcctagctgcccggcattctttgtgctctacacacatggtatgcaggggggccgcacgagtctttttcccacacctggattggcctagggtctggggttaccagcagcacccctaccccaggtctctctgccttgagcacatggagcttatctggcctgatccggacatctaaatggccttaaagttattaagaactataaaagggactttgacaaaatttttatgttaactaaaaaataagaaaaaaaatgtaaaaaacttaaataataaaaaaaaattgtctaaaaatgtctaagaaagtcaaaaaaataaaataaaaggttaaagagagttaaaacaaatggtaaaagttatagaggattaaagcaagttgttggaggtcagagaaaaagattgttacagaaagttatagagggttaaagtaagttgtagaaggtcaaaggaaagttgtcgaaggtcagagaaaaggttgttacaagccaaaaaaaaaaaatgtaaactgtgctatggtttctcatgtctacaaataaattttaaaaatggtaatataagttaaaattttaaccatattaagctgattttgttttttaaaaagtcctgtttatttctcaagtaaattatgtatacttgttttaaaaatgttctatttcctggtataaacttaagcatgttaagcaaagcaagttacggccattttgtaactggtcacatgacttgactggtcgccattttgctaaagttaaaaaaagaatacttaaaccgccatcttgactaaagatgaccgcatggaaattagaggtaccatcttagaaacaagtttttcaattaagatttaaaatgttaatgcttctatacattacagaaagaccttaagggaatttaaatttctttttaaaaccagttttcaaatgtttgtttttattaatgtttgtacttaaagagcttcaatttagaattatttctaagcaaagcctgacaatgtaaagttcttgttttataaaagatgctaatctgttacagtttgtgttttcagaagttaagtttaggatgttggtagcacacacctttaagctcaggatgttgatggcacatgcctttaatcccagcattcgggaggaagaggcaaatggatctttatgagttcaaggcctgcctggtccggcagatcgaattccaggacaggctccaaagtcacagaaaaaccctgcctcagaaagaagttaagctactgtttaaaaaatgtaaggtagctctatatagttttaagttcagctgtattacagaaagactttaactagccacctgtgtgcttcttgtatgcttaaggcaagtaactaaaacagacctctaatgcttcagagatcttcagaatatggcatttaaattgttatctttaaagtttataatgtcagacagactgccagatctggacagtgacccaaagtctccaaagattatgaggcaacccagttcctgcacctggaccagtgagcgagatgctcagatgtgaaacctgccgcctgccagaacctggccgagactgtggacaaagctgctggacactggaaaattgattgcacccctttgcctagacaaaacaaggtcagtcttttccatgtccctcttccacagagagaaaaaaactctcacagtataggcctggcgaagattactggtctttaagacacctgcctccagcggtaatggagaaacttgggtgtggctaactgtatatagactggcttctgtcactttttagtagattcggataaagtatacccttctcagatctctgaaatattactggttgtcagcttgacagcatcagtcagtcagatccactatagactagtcagtatgttagctgataaaatagtaactatctactgttcaggcacaagctcaaggtttttaagtttattttggttgtcatctaagtacaaacttaaagggcttttcatcagaccaaaggcacctctgtccaatccatacctggctctctggacagaaaaaaaatgtacatgcttatagcccaaatctgtagtttttgctaagtatgttcctgctgtttaaacagatatcgagatatctgctttttctgcactgtgggcttcagtaaataagttttaacctctgttcctagtttaaacatgtcttaaacaggtttctgcttctggctgacatctgagtatcagttgctgactacaggctgttctaaatagactgcgagccctagacttgctatggatgtgaaccagttcagctgatatggacaccccctgtctctgcaacagtgtctgctaaccagaagcccctgatggattccccattgcctaaattcctttttgcttttgactagcatttcaaccttctggggtccctaacttcgtcccaaagtcagcaggaagcagtttggaaaagaatttcgccgtccattttccctggttaaaatgctaagtcaaagggaactcccttgcatggggatgccagtatctatcactccctgatggggatgctagagagacagcaattccatgattggaatttacaaaaaagaaaatgggggaatgaaggaaccggcttcccttttggcagccataacagccgaacacgtgcttgccataaacctaccttggtcacgtagaggtcagatgcctgtctcgtgacaaggaacccatcagaagttagtcactagaaagtcagatgcctgtctcgtgacaaggagccaatcggaagttagctggtggcgctatgctttacgaccctgggtgtgctttacggacaagcgcacgacaatgacgtagagagcatagcaaccaccctgggagggcctatgagccataacaaccagttgaccaatcaacacagggcaagccctccaagcctggaggcacaccaatcgtgagcctgtgcgtacccctagacactccccttacgctgccctataagatcttttgggagacccaaggagccgtctttttctagccgtctgccatggcgggtgggtgaaagacccgagctaacatggggttagttcgttaaattacaataaagcctcgtgcagtttgcagcaagctctcgaatccgcctggtgattggggtgaccgcgaacctggcctgagaccccggatacttgagttttcgggggtctaacactacctcttggtacatgtgaacacatcttgttcttctctactccatccgttttctattgagagaaagaaaggaagacgcaaaaaggaaagaaggagaaagaagaaatgaaaggaaggaaggaaggagagagggagaaagagagaggaagagaaggagagattgattaatttgagattcagttctgttccagccagcaaacaattaagaaaatatgtctgccaccttggtatcattgaaacccaaataagacgtatttttccatagcctatgctcttaatcatagagccttataacttccgccatcacattagccaccgttcagacagatgggggacaccatctcttcatctttcctgagtgtgtgttgaaggagttcttgccacacctgccctccgcccggtctgtgtcatcagctgaagcagagaggcccctgggtccactacttgtgccttgctctgtagcagcagctgctgcctttcttaatgctggtctctttttcccagtgtgtgcttttgagctagccaagagcacctgtcactcctagattaccttgtaaacactgtgtcaagtgcatcagacacagtatctcaaacgtctctgagggatgtgattctcctagatgaattttaaagcctcttaagactttctatttgattttgcagaaatgtctcattgtaagttgtctgcagttagtccacaatgctttctctgcatggttttctcccattagaggattcctttacattgagaaatcgctcccagccagcagtccttcctccactgtggcattaggtagtgtccttcatggtatgtgacatttcggggaggaaataaagctttcttttgcatctcatagcctcatatgtgcctccttagataaaaaaaggttgttcataggaaacagcagcacactgtaagctccagttgaatattttgcttcctgggggacaccatctcttcaatctggtgaggtctccagcgagtctcctcagtgccactacagaaaatacgccacagagaattagactccgtggaaagagccttgctataaacagtccccctctgaacttcgaagggacaatggccctgtgattaaaagaacaccgaaaccgctgcctcttctttgcactgacgtggccagggagttgcttggggaacggtcatatgggagggctgacaggaatgcccaagaatttaagactaataaactaagaccattactggaatccgatcaccacagtgagttttgcttactccctccaacaagggtgtctcctagatgatgaattgcccatacctggtattctagtcaaccttacaacataaacagtctgagacattagaccaccgtgtcctctatcacatgactttatctttgaagctatgctgcagggattcagtcagagcccactgtctaagtgcctgtgtcagtactagtaaagcccaatacgaaacatttagtcaggctcacaaactttgccatcttcatttcccagcaaagtacaagcagggatacgctagctccatggtgcactagctccatggagcctctattctttcctgtctccttcctccccaactgagctgcttatcattcaaatgaaattacctgctattttgaccagatctaactctgaggaatttggcacagaatgaaaatgggaagtcaacaaccacctatgctccctaacctgggagctgcaaggggtgggctttttcaaatccgttgttttggagcaagaatggctttcaatggtagtaatgcacccccacccccacccccaccccatggccctattccatcccaaatcccccaaaagacagcaaaaaaagatgttcttgcagttacctcacatagcccggaactgctgttcatacacatttaaaaagccatttcagaatagctcctggtgtcttgaattccacctaatggcttcggcttcactttgtgtaattttatgtctgcaggaatgaggtctttctgtgctataggtgagtaacccttcaaaacaaatgccttctgggtatcttaaatgtcccttgacctcacacattgttcatctattcaacagtcttgtcttccgtgaaatgtgtcagaataaagttgataatcttagttacttgtgttggagaataagcaacttggctttctgcttaggtccctggtgacagaggaggcttaaaaatgaccatgaatgtaactgttgtgatgtcatgctcccttccttgattacaacatgtctttaactgtgtaaagttccttcccccttgattcatttttgttcatgatattttaagtgaactcaagtatatcaaacatataagtatatcaaatgtgttcaaatcaaacatgcagtgataatgaaccagaatgaaatttactttaagataattctccatcatacaaatattttgccatttatttaagatgaaagaaaagtatattttaatgagatcaacatgcttgttgagtttttacaatggaattaactggggcctgggaagaaggcttagtagatacagtgccttgctactcaggcttggagacctgagtcacataccagcacccgtttaggaagccaggtgtgatagcagaagcttgttgtcccagatatgaaaaggctgggatgggtgggtctcaggaggttcctggccacccatttcccactgagagaccccttgtcaaaatagaagctgtatgagtcctaagaagtgacacccaaggttgacctctgacctccacacacgtgcacactcatgtatctacacaaacataaaagtataaaataaccattggttgaatctctggcattgcagcatgtacagcctcttcagtggttttcacagctgattaatgttttgattttataactctccaggctggcacacaacttcaccaaaatacataatacaaaatggcaagcatatgtttaaggatatttcagaaattgctggatattctgttctaatctcaaaccaaaattcatttaaatattatttaaatgaaactcaaatcaacaatgcaaacagcaattttaaaactcaaatatcctgacataatgcaattcaaagagatgctacataacactctcatcccaaagaatgatgcaggaaaacagtagaaatctttgtttcccatgattgcacatgaggttccgaatacatgtcactgcaagttaagtcatcagcaggaaaaaggggccatgctacaaaggataatgctgtgcaggtgtgctgctgcccctgctcattaactagagctgcagggtggacaataagggtagagaagttgatgccattgtcacgagaaagttttcactcagtgcaaggaaagaattttgtgaaggtgctttcaccatttcagaaaacataaatgccctgggtgcactagagactttataaaaattattcagtatataaaaggaaccagcagaagcaagaagaggaagacaaatgagaagaatttgtctagacacaatttattttttgttgctgtaagagtgagctcatctctctgacaatttagttacaaggaggactatggctccactttagatttcttagagtgtctgctccacaatgctaacaactcacagtaagcttcagatgtcaacttggtacccagaagggagtgattgtctccatcagattgtgagcatgtctgtgaggtagagtttgattgctaattgatgaaggggcaccaaccattgctgggacagaggtaccatctctagctatgtgggcctgggctgtataagaaatttggctgagcaagccagaaggaaccctctagtaaggaactcatccacagtctgtagttcaggtcctgccttcaggttcctgctcattgatggactgtggtgtggatgtataaacagggaaattctttctttctactacttgcttttggtcatggtatttattccagcaacagggagcaaactaataagccatcagaagtagaatgagagagttgttttcttgctagtcaacaacatgaaaggaataaagtactgtttgattcaacaacatgaatgtccatcaaaagcatgatgctcaatggggggaaaatctgccaggaggaatggtgctcacctttaatcccaacactcaagaggcagaggcaggaaggtctctgactttaaggcttgtcttgtctaagtagcaagttcaagaccatccagagtcatgttgtaagactctacttaagaaagggagacagggcagggacagaaagagagagggagtggatgaccagtgcctaacaaccttttgtctgactgtggaaacagttacatataaaaatcatccaagtatattcttagaatttataaatcttattatcttaaatccacaagaaactgatctaaaagtttaaaatgaacaataaaaacctagcctcaaattgctcataaaacaaatatcattttataaatggtaatgcaattctcattaaaacaaaagcgaaaccaggagtggaaattttacccttgggagaggaaggggagagtgggggagttcatggtcctccttgactatacttgactacatagggaattgaagaccagtgtgagctacttaagcccctgtcttgaaagattattattaaataatatgaagaagtttaagtaaattttaattctgtttgtattgtcggatgtcaggctgaagattcagtgtattctggatacttatttgagatatttaccataagaaattaaatgaaaatgaaaaaggaccagagaagattctgaacttgagaaaataaggatgtgtctctgttacactggcgtctttcaatcctttgactaaatgacttagtttagaacattttttttatacatattatgggagtaaatcaaaattttatgtatttcatttggattgctgttaatccatgtgttcttaggctacatattttattttatattagaccctcattcctcatgtgactatgagcagaaacccaagttgctatgtggtagcttccctgtatagctcactgttttcaccattgtcctcaatgttttaaatagtttgactgctctttaaaacatatttattttattaatttaaattatgtgagtgttgggggaggatggtgtgtatgtgtgtaggtacctgcagaggccagagaacattgaatctcctggagctggagttagaggcagttgtgagctgactgatgtgggttctgggaaccaaactcaggtcctctgcaggagcagtcatgattgtgactgaggcaccatgtctctgtccctggtttgattgctcttcaatgttttctctgagtcagtgtctaatcttgacaggctcatacatttatttaagtttcccaaggcaattcacatttactgatattttcctactctttgcatgtctgtggggaactgaattctactgaaaggggtagcatttgactctgcaatatctttgtgtgggtagtgatgagagaaacgaatgttgaggagacaggcaagtggtaacatttatagaagaatagtgctggggactttgcaatgaagactaagaagagagaaaaggctgggtaaggaatttctagctgagggctttgaaccattccttccagtagatatttcaggaagggaagaggcaccaagatgataaatctgggtcatggtgttctgttccactggagtacagaggcagccatatgcagtatggatgattttaatatcccccacttagctatactcaattttggagttcaataataacaattaaaaactaactgggactctttctacacaaaatagccaagcaccccttatcctcattgttgtcatatctagggtcagtcattcatgtgtatgttgagagctgtttgtttgttatatacatgagtagtttggctacacgcatgcctgtgtactctgtgtgtgcctggtggcccatgaaggtgggaagacatcatcaaacctcctggaattcaagttatagactgttgcaaactgccatgccatgctgggaatcaaactcaggtcctctggaaaagccaccagtgattttatcatgggtccatctccccatcccctgtactgttgttgtcgtctcaagttctttttcaaagtctcactctgtggttcagttggcctcagactcatcctctctcccagctgtttgagtgcttagtttacagctctgtgctactcccataggcctgcattaggaatattaccatatttcagttattattacactgaaataataataactgaaaacattcttgattcaaaatatacccaggaccatttgcattgccataataccttggccatgtcaaacattcaataatcctcaatattattaatagaggtacctcagaggaaggatctcttgtcccctgtatgggttccatgactgacaaggtaggtatagaagctgccacgttgggcggggaaatcgtgtgcatacattggcatctcttccttggcagtattgggagataaatctggagtcttgtgcatgagaggtcaaagctctaccacaaatcccgcccttaacaattctactcctaaaaataaattctaaataattgtttttttttaaagtagacaaagatatataactgcataggtaaagagagaggaggacgttgagggtaatagaactagggcccaagtgatgagggaggggaaggtgtagagagagactcacagttttgtggttcaaagggtaggggcgtcttctgtttcctattcccatgctttttgcaacaaactcatccaacataagttggatgtgtccccatttctcataattctcatttcatgaggatctgttttattgttaaaaaaagaagtacctgagcataaatatttctattcaaaagggatgcagactacgatgcatgccatttctaagggtgttaagggagtgcataccactatttggttgctaagaataattttaaaaaatcacattcaaatcaactcacagattagaggctcagtcacctgctccgagaacacatctgcatgatagctaccatccagccagagcaagggtcaaatggggactgcatgcaggctgggagactctctctatgcaccacgttgtttttatgtgagcttaataactgtgtgctcttccaaaagagacctaaggcatcctccttataaatggttattgttgagatgaaaatttcaatctgtgatatgaaaaaaaacaccctttccaagtccatccatctttgagatagccgagagggtagcagctgctgtgagtatgaaaatcatttggatgcaggatcggctattatgtttcagggcctacattatcccctctcaatgactgcagcaaaattagttttattagtcagataatgagcacaagggcagacatcgaaacagtcgctgagctggcgcacctctgctatgaggacgattgctactgatgttttgtcccagggcgaggtcaacatagggcagaaagcagcttcctgtctgttcctttctgaagagcagaaaagtcccagtcgatagccaggctggctcattgtgtgaagttatcaagggaaaaaatctggaggggaatgttcagagaagttattttttttaggagcacttgaactactgttaagttaggggaatagtaattcgagtttcaccttttgaattcattactgtgagtcatttaattgtatagtcatcactggttgggcatcagaagatttctgtctagcgtggtatggcttgtaaggcaacagcccactgtcagcccaatgccccttctcaccagggttattggtagagtcaaaactgcatcaagtattcacggagactaactggaaaatcaacaaatgaaattaatgaccaactttacacaaattcaacttttaaataaagcatgtcttttatcttaggtgtgctgaaatgtagagctctactattatgcattggaaatgaccaaaaataaaagggacacaatgtagcaaagtccagtaaacttcctgaagaagattgcattggacaagttaaaacacagccatagaactgaatgtctagggattttacattactgaaaagatgagagcattcagtaccaaaggacagagccagccactagacagcacttaagaagtgttcatggttgaatagaattcatgtagccgaggctggtcttaaactcccctattgtaagaaattaccaatacggagtcaggtagaaatataagggtatttaatagggaaaagccttacttacagagcgaaccagccagccggtggtagtctgtacagcaagcagcaaagagaaaccgaaaccgaaaacgcagtccccctactcactctgaccacgccctcacaagccctcaggtactcttgtagccagcccctaagaaggcgtggctacagcttcccctacactccccatagagtggaaggtgaccttgaactcctgatctttctgcctccatctcccaagtgctgaggtgacatgtgtgtgcattaccatacccagctaggattctggtcttatcatgaagtctctaatggctctacacagtgtacaaagacactcagaacatggttttgttgatctgttgtgtccacaacttgccctttgacccttactgttttgcctctccacagacgccacccaacccagtgctgaaattccccacttatctttgtgagaacaggggaggcgctgagcttcacacacttctgctgggggtttttcattcctggctgcttcagattgcctgggagttttgctaagtgcaagagcctgacttttctttccagagactttgatacaatttctgtagggaggatatttgacatcagtatttttaagactctctaggatattctaattaaagcacaggcacgtttgagatgcaatccttaaaatacgtgtgacatcttcaatgcatgtctcctagtttcttgctttcttatataaaacctgattatcatgacaacgacaggaaattcataaccccgtttgatgctgtttgtcttggtttaaagatccaaaataaaaacgtatgcaaagagaatgaggccctcataaagaggccctattttagtttggagaatgtggcagtttgaatgtaattggcctccattaccttacagggagtggcactattaagaggtatggacttggggtgggtgtggctttgttggaggaagtgtatcattgtgggggtgggctttgaggtcttctttgctcaagctactctcagtgtcacagactacttcctgttgcctgcaggatgtagaacactcctctctttctccagcaccatgtctgcctgcacgccaccatgctcccaccatgatgataacggactgaacctctgaaactgtaagtgagccaccccaattaaatgtatcttttattagagttgctatggtcataatgtctcttcacagcaataaaaaaacaaaactgagagggggctatttaagaatgattttgaccatgtgttttagtgttagatcagagttaaaagtccagtgtgatgaagccaggattctgcagtgcccagcaggattctctgactactcggttaatcagtaaagggaaaattctattattggaccatctgcactgagaaggactagggaaacaattgataccttccatctgcaagacattagtctaaatgttagctaagggtcaccagatttccaggcagcattagagtaaagggaaaagtaaactctttttgccaagtgtggtgggaagtaaggcttggattcacagttcagtaaaccctaccaagcaagcccaccagtgaggctgatatctggttggaacacattaaagtaaccatactaagtgctaaagcattgacgaaggtaaacatcttgactaaacaaaaacaaaccaaaaatctgctctaccaggccaggggggggttgtgtctcaatattcttagaatgtttaagaataactccagataactgagcccaggagcccttccttctccatcgctctgctatttcaatttacctgagaaaagtggcctttgtcactcttcatgactgcagcctccatcaaccaagtaaacaaaagacaaaacaacagacacccaaaagcaaactacaaaaggctaaacagcaatggatttagggaaacctatttgggcacaaacagcaaacttgtcatcacccaaatggagttttgaaagcttgtgatcctcagcctgccagcctgaggcgggactaccttgaagttgacgctgtctgtgcccatgctagatcctacctcaaagccaacagaaaaaaatgaagtctgtgctgacaaaaatgggcaaagcccagtgactcggagacaaggtcctggtgcctggtcccctgaaactagccgatgtcttaactttttctctgacttgctctgactcagattgtgcttcttctgtttcagttttgtttttttgttttttgtttttgtttttgtttttatgagtccagcagtagacagtcctgaaaaataaacaggaaaggtggggtagcagggacccctaaaaacagaccacaaagaattaaaactgtcccaggaaacactctggggagaggagaggttgaaatcccagtgctggaggagcactggctggaggttctcatcagccgatttcacaatttcacggcagactccgcattcacacagcctcagcttccttccacgtttttataaagatcattgcactgcaccaggaaagccccagacacactaagaacccccccacctccactcccatacttctggcccaattttaaatgaatattttttcatttgctaaaataaatgaagtcttaaggcagcattaccaggaaagcccccccccccaagccttactaaggtaccattaataaaagccataaaaatcactggtaacaccatcagagtcagtgttttagggttctggaagtcaatcaaaagttaatgtgatcttaagcatgtgtcttctcaccaacatgtacattaggataaatataaatatgaacttgttgttgaactggtgctcacacactggtcacatgccgcattggcctgaatccgggaagccagagccctcccagccactgggggtcagagtgggggcagagctccctggaggctgtttccaggtaattgccatcatctaacttcccccttccttgggtccctagaagagccccctgtgcactctctgtctttgatctgtcttggaggttctggttacaggctctttgtcattggagcttttgtgggaagcagtcagtttaacactgatgcctgatggcctggcagagaaatggtgggaaagggggagctgtataaaaggtggcatcacacactgcccacggggctactaatgattcgtcacgtcacagtccccagaaagtcggtctgagggtcttcattgtcaggaagtgtagactatggcagaattccaggggttattagttgtggtggtggtggtatggtttttcttgttgttgttttgttttgttttttagaggggcatcagatttcattttattttaggttttctaaattggtgtgtgtgtgtgtgtgtgtgtgtgtgtgtgtgtgtgtgtgtatgtgtgtgtgtacacactcacactcgggcaagcacacacatgagtgattataaatcgtattgatagctatagaatgtgtccaaatcctctactgctaacatccccgttagtccagcacctttgtcactgacattgataattaccattttctaaagtctgtgacttcaggtttcctcacttcttaccttacattcttttggaaaccccttgataaatttagtcagcatgtaaccttagtgcctcttgcttctgacagcagctgttgaccttcgatgacctcgacaattttagggatgttgtaggtgctgaatagaatgtgccttttctctcgccagcttttttgcagttacgagtttggaggagggaggtactggaggctttaccatcatatccagcactttactgtcaatctgtgcataatatgcagcgatgtttcacagctagggcttattactctcataggatccttcagacatttctactggggggcccctgtaatccccttttccacattgttccctaggaaaggaagcaacactatgcttagcacacactattttaggagtatcatttcttgttccccacagaaattgtgtgacattcatcagcagagaagacatgtctattgctccccatgtatttattcataaccttttgttggtattagcatacttcacgcatagtttattttatacttttattttccagtactacttatggttctgaatcatcccaactttcaataccaataacaactctttctgttaatttttcactctttgaggtgcctcagttttgtgcttctgtttgtttcggagcatctcctgccttctggcaccatcccatgctccattgacggtctcacaagcttcaggctagaagcagtcattgctcccaagaagcagtgttcaaagctggatgtacgcaccaaggagctcccctctgcaccctcatgcttctgcctctctttcctcagtacagtactctgcccttcatgttcttgcaactaaagctcaaggctgcacacagtaggaggtcctggcaatgaacatggtgcagaaagcagcatctatgctttctttccatccacaccagctccagatctgctctggagagtgtttacttcacatgtttcttcttcttcttagttgatgctgttgagaagaattgagacgggcaaatgacttggtgctgtttgcttgctaatgtgccgtggtttgtggtccagatgcatgtttgtatagtacatgttgcagggttgcttttatgtatgatccgtcataaacaaagtcaatctaaggtgccccaatgggaaacaaagattaatctcattacaagcaccactcaagtggacatcatttggaggatatacgtcacgtggttccttggcccagattctctgactgttggatagaccacaggtgcattttttcatgccttaactacatgcagcctgaactcatgcaacatcatcatctgtcctctacagttctcaaatcagcttctgtttgggtgtcatcttgttcccacaaggtgtgtttaaagccactggaagagagaacgctgactcacacctcagagcgtcttgcccatgggcaggagagccatcgtgtgctgatgtaggtgccagtgctctttctgaataaggactctagaagttgcatggagggttccatttccctttctcccatggctttgtggactctgaaccaaactctgagcctccacgttcctgtgcccagatgtataggactaaatgttgtgtgatcgtccgtcctactagataatgtgctttatgaagtacggtccaagcattagctaaatgttgtcagaggtttacttgaaaacatattaagccccacataatggtctgccacgccttcctttctccagctctattatgtctcacttctcatagctcatcctcctcctcgttcttgtgtattattatgctctttgacaatgaatcaagggaagtctagtagttagttgtgtgctcacttagagctcattttccttgtttttgttcattggggctctgaaaaacaggaactatatgctctcaagcagtgaaatattttcctcgctcccactaaccatcaatttccctcttagaatttttccttgagtctcatttcagcacaatgtaaaatctctcttataattcaatgggaataaatgactggaaagcccaggaccaaagggtcagcagatagaggtttgcttctaactttgagccaataacacagtgtgtagccatgtgtccactttttgctttatgggcacccagttctgttgctatccataacccatactaatcaatggcttttgtccctagctccaaatgttgtaaacttttaaatcaattaatttagtttcaaaagttgatactgattatttgtgtcattctttgttgggataatataaagtatatagctcatagctcagatagctttagaatatgttatgaggccatatgcattgtggctttgtcttctgtttattgaaatctctgatatctcgggattttaagctatctttacagggttgacaggctacttggcagatttatttatgcttttttgttcattttttttattttccatggctattacaaaaaaattgtaactcattttttctgtctactacttataaataaaagcatttggcttctgcatattaattcagttgataaatagcatacctttttgtaaaataattttagttgattccaaatcatttaaattcagtaaaataggctgttttagggtcttgcatttgtcggatgctgtaacaaagtccataatcccatcacctgggaaacagaggtcataggatcaggtgttggtccttggctacataatgagtttgaggttagtctgggctacctaagaccctgcatcaaaaactgaaaacagcaaaagaagtttgaaatttccttttttacttaatttccctaaaatgtagtaatgaagacacagtcaaaaggtgggggtcagggcacatcagccatggactgaggagcctggagctcagtgtcactgtgggacccactggtctcaccctccataactccggactgtggacatggacaccagatggcacgtagttgtatccaacaaacatggaggaatttacctctggatgggactaaactcgtgctcatcaatttttgttccttcttgttgatatttcagttttccatttcctcaactattattggcacattttgtattgtctctctgtgtggacagcgtgaaggagatggacactctgctcccctcttatggggaggtgtggtgcgggtacctgagggcatttggctgccctcacgggaaaaaaattcaaactaattcaggtctatgatgaagacggaagggtccgtgtcctgacatttcatggcatctatgaaagccattaaaaacaagtgtctctacaggcaaatcttagtcatttttaaattcccatgttgaaaacaaagagacctcccatagatgcaaagcagcatggctcttcctttcttgttgtaactagtcctggctccttgtattgcattttgtgtactcactcacattaaattaccaccaaacacgaaggaagagacggagggaagaggcatgcttgcttcccaggccgccataattagtgttatcatttgtagtgagctcagctgctgtttaaccaaacaaatgtttgtacttaaacatttgacagtgttttctacaaatctgctgcttttcttgcatagttagctcagctgtcaggtaaagcatggagacattgtaaatcaacggccctttgatggtgtttaaacctcctgtaacttcctgtccttggagagcatagtaaattgatccattttgaagaaatgtcttcagagcctgggttcccgctttccaaaccttctgctccttccggtgcgagtcacagctgagaagtcacaggtgaggtcaaggtggatggttacctggttaataaggccacagtcttatttaagaaccataataagcttctaaaactacccgatccaagtgtcttgcttaaggtgataatgaaagccaggaggttgaatggagtccgctggtggctgctcctcagccctgggagatgcagacagcaggcactggctttagtggatcctcttccaagcctctctaaatccagctccaggtcttctgctctctgctttctccttcctgcccttgtgaagatgagatctctgtcactggagccctgccgtgaagagaaagacaccctgttcaggcagtactggagcacagaacttgattaatctccactttaagaatccaccagagagcagagccgctgcctggcagaggcctcactcccaaggagccatgcctcctgctcacccattcagaagcagacaggactagatctcttcgccttctcagtgataacagatggctatttggaaatgtttgccatgaggtagctggctggggagaaagggaaggaaataaaaggctggttgtgatgacaaacagtcctgaagttgtgtcagaatctggaatcaacttcttgctaagtaaggggaacacctgccacggaagcaggaggaaatgcaatttgggagcagttgatgacagcgtgtccctggcaggtgtctatttcaaaagaacttgctcacctacttgcttattcggcagactgtgatggtagagaggggtggtagggcaggcacagcagagatgctggactctccctactgggggccaacggccaacgtctttatggtttgaatagagtaaggcaatcgaaacttggggtgagggctgtgaaatgagttgtgagtcacacaggaccgtcaggcctggggaataaagatcccctttctggctcaagactttcttttccttttccaaagataaatcagtatctggaatgtacctcaacccacgtatggatccatcagtgatctcatttaggacacagggctgcagtgacccacgtatgggtccatcagtgatctcatttaggatacagggctgcagtgacccacgtatgggtccatcagtgatctcatttaggacacagggctgcagtgacccacgtatggatccatcagtggtctcatttaggacacagggctgcagtgacccacgtatgggtccatcagtgatctcatttaggacacagggctgcagtgacccacgtatggatccatcagtgatctcatttaggacacagggctgcagtgacccacatttactttcccgggtctgttacagcttcttcagggatcgctgcattcctcgctctacactcctccacatctacaggcatctgcctgtgtcctcacagaaagctgtccctggtgttatctaatccatgccctttgacctagtcaaaggaagagccacaggttatctttttctctctaaaccttttccatttcacacagcttgtttgcacaaagacccttcaagggcatgtattggcttatatcaatgtttttcatttgtatgtattttgatgtataatgtccttaaatgcattttaaatgcattaattccttaaatgcattttaaatgcattaattaccccagaagagtgaaacatatttggaagatactttccttggctttgtattttcactcaagagttagcatgtagcgttgcattcattgaacatccaacacggggtgggggtggtgtgcacctcagtcctccagcacatcagggatattgctctctcttcaactctcagcagctgtggttattccaaatcggccaggacaggactgggccctttagttctacagctgagagtggagggaacttatgaggccccacccctttgtggatttacctgtgtttcctggggagaggtgaagctgcttcctccatgctccggtggtggtaagtaaccccatttagatccaaccggcttccccggctagatctgagtgggctcgtttcctccatctttccttggtgtgccatctgggatgggaagatgtttgtgcacacggcctcagaaaaggcatgcaccaccctaggcttcggggccacttgtttgtttgtctgtttgtttcttggcactaagtgcaatgtttagcttccctaccatttctcctgtaggcagattgacttttgaggcacaatatcaagaacaagacaaattcttttgtcttagtacttttgccttgttggattgttttgattttcatttgggggcttttttgttctggagggagttgagaggaaaacaaacatggttaggtaggagggagatggggaaagaaaacgtttacaatatatgtggggagaaaaaccaataaaacaatatcctttgtcatatgaattccagaagcagggtccacactcttcagaaatctgtaactgtagagatgagttgtctccacttgacttaggagaaaactgacagtagacaagaaaagcatctcttgtgtgcatgacactatgtttcaggccatctgtcctcaagataacctagcaaccatgcctttctcaagcttttctgctgtagaccaagcaggactgtgctacacaggaaaatagtcagtgaatctgtttggatgcctggggtctggaccaggtgtttccaggtccttggcgttgtagccagtgacttgaaatacacccacatgaattgcaaagaagcagggagacttgattaaaagataaaacaggttgtatacagtcaagagtgacagtgggtcacaggcattaaagtacccaagggccccaattattttctggggcttccttttatgaagtccaagaggagtttggctactaagggcatagtttgggtggttctctgcctttcaggcttggactacataagcctttgcctcaagctacatgtccttgcccataatgcacctgtgcacccatcccaaccagcctaggctgaatgggcctactactagggatcaggatatttattcctggatgtgactgtatcgtttgcatgatcgagtgatgctaaggggagtcgtttatctttattgcttaaagcaggtgtgcacacagctgggtcgagctggaaaccccatgctgccaggtgcctgggtgcgttgttagggaggggttggtgcatactcaagccaagcaggctttcgggcctccagtccttaagctgtgtattaacctgcagcctgacaaatgctcttctgaagagagccagccccttggagtaagggagggacccatggagggagatctcaaggcctgtctgtccctcaggcttctgtttttaagcccatagaagactgaactttccccactgttcactttttatagctgaatttatcagatgggagtctcgccgattaaatgcagctggggataaggccaggcttccttgtctcctttaaaattcgtttctgttctctggccacctctgcctcccactctctggttgtcactctatttctctttcctaactctatcccatgccgcagaggcctgtcattcactgtgcgagcccagtgtgagctgtaggcatgtttgtcttcctgagtctagccactcttcatagtgagtggcctgcttttctgtttccttctcgtttcttgttgcttttcatggtttgaatcttgtatgactccgagctcagcctcatcttcatgccatgaaagtaatacttcactgcacagagctcatttggggcccagggcccaggtcatagagacttctgagtttataaggaggtggcaggatggggcatgtttcatccttcctgcctccctgggtccccgatctgcctgggactattggtacagttccgtgtcctttgagagtgcctgcccatgcatcgctgtcttacacagaagcatctgttacacaggaatggagtggatccagactttcctatgcacacagtcagcttaaatgcagtcgacctctgctgctttaccttctccatttctacttagagcttctcccctcctggaactacaaagcacatgcgcagctgcgttgggagatgcctgatcatttttaatggcaatagttccatgaatttaaaatgaaagcctttgggctgtttacacattcttgtcagctgcttactgtgaagtcacagggtaacttagccattcatcctgaaagagatctctggatacttaaaatgacatcagccactgtaaggggactcagcctaacccacagccccaatccttttgtgtcaataaggagaggcctgatagtcactcttgctgtgaggtcacccagagagctcctcttgatcaaacatccatgttaaaagtttccagattttagaaagaaaagccacaaactaagaaatagttgctgagggagttttctcaatgtagttaaaaactatacaagcccgtttaagagctttcagggagtcagtcaaattgctaaaacaataaaccaatgtgggtgacaaggtaatgacttttgcctcctgtcttcactggacaggaaggtgtggctgtaatgtctaggacaaagcctggccccagctaagaatctctccacagatggctcacaagtgagtagaccttctctttaggcgaggctggaattagaatttgtggctgaggttctttatgaggaattagtactgtcaccttttgtgggaagacggtttaggggtggagtgtgagccatggtactgggagggaacagaaggcagggtttctgcaagtgataaagaatccagtgtcctttgctaaccgaaggatgcctgttcaggcgctagcagccctccggctttactgttccctggagaaaaataatacttcctgcaaaatcaagagaggaattccacccttttagtggaaggctcacttcatcctgcagactgaggagggagtggctcttttatcccaagccctcacatttttctgctccgtttattgctcagatctggtagctctcattcctggcagttcatctgaatcacccgtggaattaagagaagtactgacacccttgcgcccatgtcccacctctgctttgatttatttggccagtgatacaaccctggccctagtgggttttacttctctgttttgttgtgttttaagatcttagatggttttagtatttgtctaaagctgagaaattttgttcagtcccacggtgcaggagtctgtgtcatctactttattgggaagacatttggccgttacccctggctttagccatgctgttttgtctgcccctgacaccctgaagtgatctccatgcctctcagtggtttctgcaggtaccacctgattcccttgagtccctgcaggacatttgaaaatagccctttgcaaggaactccaaaatgttacttacacataagtatatgcagtggagatgtccaattttattctattttggttccgaaaatgactatctcaacctagaaaatatgtcaacaagcggttccctgaagagcagtcaggctgagatcacagcgttgggatgtcagcacatggaagcagagggagtctgtaccacatcctcagacatcttttcttttttaaaaattctggtagccccaaaagcaaaggttcaaaagccatgacctagtaggactctattaactatgaggaggaaaaaaaaaataagtttctattaaaaaacatacacaacttagcccatctgtagctcactgtttctgtctaggaaatgaatatagagtattgtggacctaacgtctcatgagatgagatgaacttcagcgtcccaacagtttgaaaattccgatttcattcctcatttgcttaggaaaaacaaagtccaaagttgcttctggcccagctattcagactaaaataaaaagccacctccctctgggctctactcagagctccacagctggcctcagcgggatgccaagcagccctttgatcttaggttcccgtcatcagttgtcactcacagtcactgtctagaaggtacacactggtgagctgtaaaccgcttcttcctgcatattttgaagaaatacatgatttgaaataaatggtgatgacaaattcatggggcataacagcccatggattattttaagaaatacgtttctgccaatcaattagcaaagtgcaactaaaaataaaagtctaagggaaaaagataactgctggccatgtgactggggctggacatggaatcattaatggttcgtacaaagaggagaaactgcccaaagcaatgctggaaactcagtgacatagaaactggattctggtaggaagctgcttccttttccaagatacaaggaatgcttttatgtcatgagttagcactgtactccaggactgggaatgaaaccctcccttccttggttttattcctaagaatttttcatacatatgagaaaaggagaagaaagtcagaagagtgcacctaaggatatatttatactcttttgcctcaggaatgctacaataaccaatatatatacactcattacgtgtctacagcatggggttctaagtgcaatgctaagaatgagtccttcgtctggaggacactatggatgaatcatgatactggggaggaccaatcggctgagctcagtttagcataattaagattgaagatgctccaccaaaagtaaatcagagtttaaatgtgtttatttgtagattagtaaagaaaataaaggttgataaaagctggcggtcttaagatgaaagtgtggcatctcaagttctttattatttattattccagccatgtgactttgaattcctgcttagcattttcactcagttgactaacaggcatctcaaaagcagcatgccgtggaacttggcttccatctcataaagagctattctggcttcctcgccttcccttatgcctttctcagtgacgtcttccagtttctccggtcaaaattttaagtcactgtgtcttttctctttctccttttgaatccagttagagggtcaatttcatttcattggctggcatggtattaccacctctcaccacctgttctatggacacaaatgtcccggccaccagacctcttggtgctctgtgtttctcccctgcccaagccctcattatcacatattcccaacacaatagccaggacaccctattaaatgacacagtcagacatttatttcttctttccttagtgcaagtggcttcccagtgcaccaaggattaaaacaaaatccctgcgttaaatcacaaggcacacacaaaatctaggtctcctacctctctcatgcctttccccctcttgctcttagctgtccaggtccttggagtgtctggaacgataggttccggctgcagggatgcctgaaggagtgttgtctccagcaagtaagtgttgtcctgttgtctgcaagccttatcctgtgcctcctttaggcccctattcggaaggggtcctcccatgaagaccttccccaaccagcctataccaacacgtacctacatgtgacatccttgataaccacgtcccatggacaaatacagaccttcatgaactggttggctctcattggagacattttgtcatggtttatttctgagcagggtcagctcccatttcattttcctttcttttcatactatttattcctttaaatcttagaggtgagacttcaatactggatgttcatgtttattatttgtatcgagtttgattgctttatgttcatggcgatatattgagtccaaattttcttctattttgtgttaagccgtgtcccatatgatctacgatgtttgatattccaccttccactggctgcagtgtggatgctacaccatatcagggtgtggtttggatgcagaagaataagggagcatacagcccactcccgctattgcttccatgtaacaggggccaacacatagacatttgagatttcatctttagcagaactaaaggaacatgggcattcacatcctgatgtggggaccatgtttaatgaagccttcttctagcctttgaagacacccatgcacacagcatgtggtgcacacttgtccatagacacacacacacacacacacacacacacacacacacacacacacaaagcaaaatattttaaattgtgagcataatgagtattaggccaggaagccagcagagatgccatgaacgctggctggctcaatgtcaaaaccattgctcttctgctaaagtgagctagtctttgtcccgtgaaaatcctttgagaatttctcacaatccctgccccaattccaaagctgacagcaggttatacaccaaagaaagttttcttccccccttttaaaacactccagatgtcatctgtaaattatattaagtgtgaatatgtaactgattcagacaataagcctcaatcacatgaagatgacattaatagcacatcgccatattgccttactcacaggacaagtcaattttatcatgctcccctagttgtgttcataacagtctaggctttccctaacttgaaatcacatgttctcttttatagtatcttgtatcattatttaatatttattaatttctcattagtttgattaattaacatactgtgtcaatttgtgacagagtaattaagagaagtaatttcactgagtagaagagctcaatattccatgtagcgcatgtgggatttttatctactgaaaattacatctcaaaaatagcattaaattacaaaaccaagccaatttaaccttgagagaatattaagccgtactcacagccttaagtgcctcatttgagattattttaatggttacattacagtgttcttttagtgagtatcagattttgtgtcaagagctaacttttagaactctacgagtttcagaggtgcttgtcttgctagagtggcagagttggagcgtgggatgggtccacttcgccaccctgaaagctgcattagtaacttgtatcttttctgagacaaaatgcctgataaaaccagcctaaagaaggaagattcactttggcttcatcttggcaaggggaacatgaggcagctagaggaggagtgatgtccagggccaggaagccaaggaggtgaacactggtgttcagctggccttcctttcttattcacaatggttcttcccatcctggttcttctctggagacacctttacaagtgtgcccagaggtgtgtctcctgattgtaaatctgtcaggttgactgtcagaatatggtctaaaactggagttgtgtgaagagaattctgagtgcttaggaggaaactccaagaaaacaagacatgagtcttatgacatgtatgtcttcaggacagggaattgttcttggattgtgcttgcatgcccctcccaggtgtaacagataagagtgactttatttcagattattcattacaactggctattgttgtttctatgcctctgtgcaaaaacacgcttttgccatgtgtggcttgtccttgtgattgtacacttgactcttcttaatcctcagagtataaaccgtctggtgctctgaataaagttggctattgcatgagactttagtctgcctcattttaaggccctactctcccaggttcatactgctgactagagtggtaaacagttgccaaccagaattaaccatcacaaggactgtggcaaacagttgccaatcagcattaaccatcacaaggactgtggcaaacagttgccaatcagcattaaccatcacaaggactgtggccaaccagttgacaatcaggattcacctgattcacagttgacaaggacctgtgtctggcaggggagccttccttataggtgcacagaggtgtccctggcgggttaatgtcttgaaggcttgaaggttaatgtctagaacatgttgagccagcttgaaacaaacatcccggaagcccagatcttcagggccagaatccttggtcttggagattgggagctttctaaggccagcacatttggatcatgacatgtacttcttctggaagttaccaccgtgttttccataaaagatttacttctgtctgtgtctattgaacctagattctgtcacagctctgcattttttaattgttttaattttaatttaattttaattttaaaaagttttaattgagacagtttaaactccttcccccacacatgtatcaagattgtgtgtgtgtgtgtgtgtgtgtgtgtgtgtgtgtgtgtgtgtgtgtacacctatgtgcttgtgtgtcatgtaggtatgcgtgcacatgggtgtgtatgtagaaggcagagactgatgccagatgtcctccttaggggctttcattactttttgagacagggatactcaccaaacctggagtttacaaatcctgctgggctggctgactagtgaaccccagagatctacttctctctgccatctcagtactgggcttgttgacatgtactacagatattttcatgggttccggggattgcatggcaagcactttgtaattaactgtctcctcagtccccaggattataaagatttgtactacaatttaaatatcgttgttccactaaacagccacatccttttcagaatcatagactctcttataagagactgttttgtttattataaactctccatccagtacattgagactgagaggatgattaccattaactgagaattataattgggaataggtttgaaacttagggctgtacatcaaagtcaatatagttaagctgcagctgtcaagagcaaagccttacgtcttccatcacgaactggtgagatgtagcatgcagctattcaggaggaacccctgcccccacccccactgccctaccttctgctggtgctgtagtctaattcaccaacatgggttgccttagacagctgcacacagctgctagtatgaattatcttgaaaaccaaacctgattgtgtcattttccttcttaaaccggttcattacactttagctttggtgtacaggttgtccaagccacaaaaccaagtctccgagtcaagatttcaactcagccctgacagtgttgatgagaactggtgaagtggtctgagtggcagaggaataggaagttccaatatgtattcagtgcctgccacatggttgttcatctctgtcactgtgaaaacaggcatgtgcaggagctggagaggtggctcggtggttaggagtgcttgcagttgctgctcttgtagaggaccagcattcagctcccagcactagcgccaaggagttcacaactacctgtcctcctatatccagggccttcaacactctctttggggctccactggcacccatttgctactgtgcatcctcttccttcctcctccctctttccctccctttttcccctccactcctttttctccctcacacatatgcacagtgtcagatccagggcagcatgaggaaggttggaaggcagcattggccatgcactacttagttacgaggaagctgcaccatgagtgatttacaaggtttcctttcagttctgtcaacactgcagcagaaggcacccagcggctcgcggcatgagctctagattccaatgacctagatgccagtcctgcagcttatggtgtgggtgaaaagatccagagtgataatccacaaaaagttcttagtccatttctggtgaacactaaattgtcagtccaaagaagctgttgtcagatgagattttacttgtcacccttcttgctaaattattaggttcagaagaggaaatgtcattttaatagcaggcccatagtgtctcaaccacctggcctatatagtatcagtttgacggatattactgtgacaaatggcattgcgtctgctaagagcattcagaagcaaagcaccacaggagccggggctgtttgagtcagcttttcagtagaagggggcagcagaagacgcctacgctctaaaggtagacaggcggtggccttgaaccacatggtaagtcctggaaagaacaggagtgtcatcttgaacaagggaaaacatggcataatcaaccctgcacagttgaaactcaaacaccgatcacaatatagaagcaatatcggaggggttcctgattgggggggagggggcagggaaacagataagatactggcaagaagcaagaagagagaggagaaactcccgaagagtatgggacatcattggagtgaagaaaaaaaaaatgctctgagctcttaaaaaatgtgagggtggtaaaaatgggatggtgcacctgtgtgtaataactaactactgagtattagagttcagattcctaaaataaaaatctcttgtagagcctgtctaaactttgggatttggggctaggtagatagatgagtaggtgacgagcttgcttcacaagtatgaggacccgatgacctgagttcagatccccaaatccatgtacacgctgggcctgcctggtagcatgggtctgtagccccagcacttgggagtaagaagggagcagatcctaggggcaaggaggccagctagtgctccgggttcatctagagactcttctccagttctcagccttcccaatgttgccacctttcacacagttcttcgtgcccaaccataaaattatttaccactacttcatagctgtagtgtttctactgttatgaattgtaaaactgtaatgtaaatatctgatataaatatacacaagcctaaccataccacactccaacccacacacacagccagcgtcaggggcttcaaaagccgaggcaggtggagttcctgatgagatggcctgcttcatgcatggctcctcctctgaccttctgttccagttgggtaaaggccagtttgggggtgctaaagccattttactctaacaatttttatgtatcatttgaatttgagttgcaaaatgtcttaggatgcttgtttggcttttcctgttagttttaagacaaggccctgctgtgtagctcaggcaggcttctaattcctaatcctatgaccaaatatatccttcatgtagccactggctcacactgttcccatgtccaatgccttgtaattgcactcagatattaaacttaaccttcatgaaacgaatagagacaaaataattgcacccaatgatcgatggtgtgaatactgtggaaatgtgagctcatcattggaaattggaacagatataacctgaatgggtctgtaatggggagagaattagattaagaattatgcttgtatcccagctatggtgtgagcagcagagcactctggtcacgtgggaaagctcagcaactatgggcacagttaaagaggaggcaggggcctgtgggaatcggtcagctggatgatccgttctgcagaaggaatttatggaccttgggaatccccagtatagaggtgaactgaggaatagggagcccctaagggtggagtgagatgtgttttaattaatcgttttgagcatgagcgattagacttctggttaacactttgctgctgaaatagaagtgactaaatttatgaattagtttctcaaggctgttcccagtggctcagactagcaccctctaaatgtcaggggaaagggatttttcagatgaggttttgaacaaatgttaggtactctccatcttgttggacagaatcattcaactagcttgagacacgttgacaaagactgagttttgctagagaaagtcttcccaagaccatcacgtcaaacccttacccaaatttccagctggtggcttgtggaatttctctcaagcctgcagcatctgctctcacttaatttccatcctgaagaactgggctacagattctggatttgccaatggactcctcaagtgaaacgttcatcaatcaatcaattgatgatcaaccattgatcttgctccctcccctcaatttctctcaccctccctccctgccacctctctccttctccctctgagtatatatgcgtgtgtatttattacagaaagcacaaacaccaaagattttataaatggccaagagttgacaatgaaaggaaaggctttctttaagtcaaaggcagcttcaatatctacagaaggctggaagcagctgcaagcttgtgaagctgccttggtctcccgtcttcacccacccctccataaaggagcaaacccccgacccccatggttcctggtgcctggagacagactatactgggtaccatcctcttttccaccgaccttctaatggcctggcttcttgtattgccaatgtgactttcttctaattgcttaatgccttttattgttagcatgtctcaaatatcagcctcaatggaaacttaatgaaagccttgaaacttcagtttgggcttcacccttgtagcacctccaggaagtagcgagaggcatgcccacagcttgtagaattcaaggttggatgcagacgtggaaatactttgtttgttgtgctgccagtggaagggcgaggacaaacgttaccctgcgtgggtaattatcctcctcagttcaggtcgtctctaactgcattctgcctttgaaccgtaagtgtgttttcagtccactcccagctcagggtgacctctgagggctatgtgtcatgtgatgcaaagccaaagcagaaatctcaagaggcttgcatggtgctgtcagcttccttcagtgtagaactctgtgcccacaaagtaccctagagagagcttgcttcagctcattcagcaatgactccagcttgaacttcatctgaacactttgtggttcccagttctgttcagagaattcaacataattccttgcattgcctatactacctgcaataataacgccaataaagttacaccctaagcactatcaataagttattaacttctgtaacttatgtgataaagacagcagacaattgcatggaatttacttgcaaagttaaagttgttcattcctgttgactaagcaatactgtggacttacccattaaaggtttgtctgtgtatctatatcctcacaaaaaaatattttagtagcatgtttagttcataattgcaaaaacttagaaataaccacattagccataaagtagctagatgaggaagttgtgaaatactaccaattggtaaacaactgaccaaattatcaacagagatacatcttgagtcatttatagtttttgttgggaaaaacaattcagaaggctacattatcacaataggttttggttggttttttttttttttttttagaaagtttttaaaaaaagctaaaatattaattttaaggatgcaatcatatgtggccaaatttaagaaagggattttcatgtatctcaaaaacacctaaggggcaaggaagcaataggaggcctggatagaggatacagcagcaggtttaacagggagaggctgttttgtaaaaggtgttactgagccgtagctgcatgctgatactcatttttgctgtcagtaaaatccttttgcctaaaaggcagagggaagctggcaaggcacaactgttttttgcttcagaaaccaacaaaagaaaagagaatatggatgatatatagtttctgaaacctccagattttaacagaattcatgacagaagaaatggtatgtggccaagactcaggaaactgaagaattggagggatgagaagagattccaagagaatctgggtgctgggtgcagcagtgacttccaagcaattattctagctgcagtcaaggaatgagcagagctgtgttcagaggattaaaggaaagtatggtgacattaactccttgaagtgtctcgggaaggagtgcaaactaccaatgagcaaactgcgttcccacagtccggaagcacagtaactgcccttagcttccgagctggtctagagaaggcactcgggaaccagaaactaagtcagtggttaattgatcacaggaactggaagacacattagtggttaatgggatgaacagaaaaataaaatgaacagagccgcagaggtttaaacagaacaaaccatgagtacagtggagatcctagttgggagataaataaagtggtaatttgctaaagacttcccaaatactatgaaaacagatatctagccagtacaggtccaagaaaggccatgaaaccaaaatggggagaacttgaagagattcacatgtagaaggctgtcgggcttttgaaagtcagcagcgccaggcgttggtggcgcacgcctttaatcccagcacttgggaggcagaggcaggtggatctctgtgagttggagaccagcctggtctacaagagctagttccctagttcagccaccaaagccacagagaaaccctgtcttgaaaaaaaccaaaaaaaaaaaaaggaaagaaagaaagaaagaaagaaagaaagaaagaaagaaagaaagaaagtcaacagcaaagggaatataagcaactgaagctgaagtctctcctgaagcaaaagttactgaagatacagagcaagaggcagcttctggagtgcagcatgtcatttctcagaagtctgagtagatggggagtatccgacccatcaattctagttacttaacagtgaaaagtgaaaatatgtccgtgctgactgcagcaatatctattacagcggtgtttacccttttcacaaatagagaaacaagtaaaatgttcaccagtggatacgcagatgaagaaaatgtgatctagccctgcaatggaatattactgagctatcaaaagaaatgaatattaatgaagcattaatttggggtgaaaacaggttactaacagaaaggctaaaggaactactttgcatgatagaaatgttataaaattgtcttctgatgattataaaactataaatttgttcagttattgaactaaatactcaacaaaggcttgttagtccatcctaattggattcctgaagtgtgcatgcaaatatgtttatctaaattcagtgtttctaccactttagtttttactgtaagttgctaattccaaaattgtcttaaaattcagcaaactgctgagggagttcaaccacaagaagaagcttgctgcctaaaaaaacatgattagtaattagatagttattcatttttgactcaggtttcctgttgacaaaacaaaaattccttgaaaaacccatcattgttggcatattgtcttaacatgaaattacttcattgtgtctcctttttatcagtctacatagagagcatgtaattccctagatttgcctggaaagagtctatataagggacacaatgggaggccataatcagaagcacagtcatcccctgcctgcctcacaaacagggccacttcagagcccctgcttctgcattcaatgtttgcacactacaggaaatttcaccttaattgctttttccaaaatgaactctccttagtgagttctaatggctaattgttccaatatgaagtcagccttcccagattcaaaagacaataaaactcggatggaatcagaaatttacttcttactttgagtttgaaatttgtagttgaaattgtttgtacgtggcagccaacccatactcttaagattcacaactaaggatatgcttacattagctgacaaggtggctgagtgggttaaagtgcttttagtagaaggatgctgatctgagttcaagccctgagatccacataaagtggagagagacagttgattaccgaaagttttgctctgtgtaacaggagtactgtggaatgcatgtgcacacattcacacactaaccaccatcatcatcatcactgtctttttaaattttgagaagacatgcttgtgagaatacatgatgagacacggtaaagaatattcttaggaacattgttcatagctaacaaagaatagatacactagaatatagaacacaatgacttgctgaaaatatttagcaactaatttttttatgcttgggatcaattctggggccttttgcacagccatatctctaacccagcaaacagatctttaatgaaaaaagttatggtcgcaatcatctccagttactactacacagacacatttagtcatttccctgaatacgttttcccaatatcgatgtgttgaatataacaggaagtaagaaactgacatctgtaaactctttttttgctcaataataaaattaaatacctggtatgtaactcagcagtaccttccagcattttctgaaacacagtgagctgttcatgtgttgagcagtatgactccttagccttcaggacactggcagcacacatgtcctctctgatgtgtccaccacattctaataattcgacttgcattctgtaaatctctaccttctctagagcacaggaaagctgtaagaatcttagcgatcatattcccccagggatctaacctaatctagtaaaaaacacttaagtcaattctcaggcccatcctgctgtggtatctgatagggcaagtccagccatgctggctaatcctgggctgtttccctatgctcccatgctgtccatctttctctgcttgctgtgactacctttgatattttaacctagttctacaatgtgacagtgtctgcttttatatgttttctaagttccaagctgtatctgcttttgccgacttgacctgtgtatttatggtgtgtacatgttggaaactgatgggttctctgctttctaaaggacatttgagagcaactgttacaatgcttgcttcagtccacagaaaaccacaagtgagacttactctttctggctagacaccattaggcaagcgagctgcactatgtttttggttgcttccccacagtagttttcatgggttgggaacagattttccatgaagcaggatagggaggctaggcctgccatgagtctagcagcaggagcgcttgaccagaaaccagaggttggtatccttctcttgaacttcccaatttccagaaccatcagccaaaactaaggtgtttatgtttacagttacagtcttaggtattctgctatagcaatgggaaatggattaagacaaccagaaactctagaatcatctagagtctagatgacggtggcaatctgtagagatagatgtgcacagcccaggggcttctctgctgctgtatctggtcacactttatctccagtaatgtagggagattagcagagtgtgtacatatgcccaatgatacaatgttgcaaagggactgttgtgatagcaatgcctataggatgtctggaggttgtacatactgcccaatgataaagtgttgcaaagggactgctgtgatagcaatgcttacagaatgtcaagttctgtgctggaagttgaaaatatgcagacaaaagatgtgtttccatcccactgagaaatcaatttagtggaaaaacccacataatgaaactataatggaataataatgggattattgtgatagagtaatgcataacaacaacatcacaggggctggagagacgggggggggggctcagcagttgagagcacttgcttgctcttgcagaggacctgcattcagtctcccacaagcccatctgtaactctagttccagggttctgatgccctctctgccctctgtggtcagtatatgcatgttgtacacatacatacatgtaggcaaaacacttgtacacatacagtttttaaactctaaaaaatgaaaatgcctctcaaaatagtaacacagtaatgtgctaaatggtttagatgtagtttgtataataataggaaacttactgtggttgccattgcatgagtgtgagcagaggcctgcgtgcacacagcgagaggaagtgagtctgtagaacaccccaaatgaacaatccctgatggagagaagctttaggtgacaagtgagttagttggtgggggagaacgatagaaaagagcagcctagttttagtttttctctgttttgaggtgtttgttttattgtaaactgggtttagctaaataacccagactgacttaaaacttattgagtggaacaaagctggccttaaactcatgatcttcttgtatctaccttccaaatgctgggaccatagacatgggccaccatgcttggtgagggcaatctatttaagacaggactatttggttgactggtgttcatttttgaaggaaacccttggaagtgaagtagttagcagctaacatcctggactcctgccaatcacgaggttgtctacctacagggatgaaaatggacacagccacactctgtttacccagcagctcatcttacacactgtggagccaactttgtcatctgtggctgtcatttatcttggaataaacactctaagatttgaggttccttaaaaactatgaagtacagccaacatacacagttgggctttgatgaatttattaacaactgcacagagtttttatgagctcacagaggccaaagcagtaagcacaggctgacatgtcctctgtggatatactatagtgttcagtttagcattttttttctggaactcttgaatgagtgaacaagtgggtctcaaattcaacaaatggtgcggcataactggatgctggcatgtaaaagactgcagatagatccatgtctatcagcatgtacaaaacttaagtccaaatagatcaaagacctcaacataaatccagccacactgaacttattagaagagaaagtaggaaatacccttgaatgaactggtacaggagacaacttcctaaacataacaccagtagcacagacactgagatcaacaaataataaatgggacctcctgaaactggaatgatccaaggtctgccaaccagtccttcaagtggagcagccagtgggctgacaaaagaagaaacttgccctggctgagaagcttctgtaaggcaaaggacacagtcaacaagacaaaacgacagcccatggattgggaaaagatattcaccaacctgacatttgacagagggctgatcacaaaaatttacaaagaactcaagaagctagcctccaaaacaccaaataatccaattaaaaagtggggtacagaactaaatagacaattctcaatagaggaatctaaaatggctgaaaaacaaataaagtgttcgacatccttagccatcagggaaatttaaatcaaaacaactctgagataccatcttacgcctgtcagaatggctaaaattaaaaacaccaatgacagtctaagctggagaggatgtggagaaaggggaacaccccctccactgctggtgggagtgcaaacttgtacagccactttggaaatcagtgtggcgattcctcaggaaaatgggaatcagtctaccacaagatcctgcaattccattcttaggcatatacccaaaagtagcacattcatacaaggacattcgttcaaccatgtatatcacattatttgtaatagccaaaacctggaagcaacctagatgcctcaactgaagaatggatagaaaaaatgtggaacatttacacaatgaagtactactgagcagaaaaaaaaaaggcaatagaatgttgaaattctcaggaaaatggatggaactagaagaaactattctgaactaggtaacccagtcacaaaaagacaagcgtggtgtgtactcactcatatgtggattttagacatagagtaaaggattaccagcctacaatccacactgccagagaagctaggaaacaaggaggaccctaagagagacatacatggtcccctggagaaggggaaagggataagatctcctgagcaaattgggagcacgggtggggaggaaggaactagtagaatgagaaggggagaagaggaggggtgaggaagacatgacagggcagggaggttgagttgggggaagaacagaagagagcaagataagagacactataatagagggagacattataggtttacagagaaatcaggcactagggaaatgactggagagctacagagatgacaccaactaaaatctaagcaacagaggagaggctaccttaaatgccctctcctgataatgagattgatgactagttcatatgacatcgtgcagccttcatccagcagctggtggaagtagaaacagacacccacagctaagccttgagctgaaatccaaatgcagagaaggaggacagatgagcataggggtccataccaggctggtgaaacccacagaaagagctgacctgaacaagggggagctcttggtccccagactgatagctgggaaaccagcatgggactgatccagaccccctgaatgtgcgtatcagtgaggagacctcggaaatctatggggccccttgtagtggaccagtacttattcctagcataggaatggactctgggagcccatcccacatggagggatactccctgagcctagacacaagggggttagcctaggccctatcccaaaggatatgacagactttgaagactttgaagacccctacagaaggcatcaccctccctggggagcagatagggtatgggataggtagggtattagttgagagggcaggggaggaggggagggagagggacctgagattaacatgtaaaataatcttctttctaataaaaataaattagatataacaaagaaaacagaaagtcactacctgagaagaatgatccaaggtctgccaaccagtccttcaagtggagcagccagtgggctgacaaaagaagaaacttgcccgggctgagaaagaacaaatgaaagtagataattcctgttcactctgagaagtgagaataatttatgttcagccagagagacagagacagagagagagagagaaagagagagacagagagacagagacagagagagacagagagacagagagacagagagagacagagagacagagacagagagagctttatacccatatggcaaccatacaagtctcagagaatagccctgactgcaagaatggaactagccctaaactatgctacagtctggacccactgtaatgaagctttaaggtctcagcaagctaagattagagatgggttgtcttaatctgttacaaagaatctgttaattgctcacaattttcaccgacttgataggaaatgacaaagtgctgtcctgttaaagccaggtgcagtgacaatgtccccttcactggtgtctgacagtacgtgcaatagagctgagaatgaagtaatacatatgtatccttattttttagcattgctgtggcaaaatatctgcagaaagcaatttgcagtgtttatcttggctctccacatgagggtcccttccatatggtgggaagctgtggtggtagacatgtgaggagctggtcgttctgtaccagccgtcattagggagcagagagagatgagcaatgtttctcagctctcttgctcctttttacttcagcccaggaatctgccccacggaatggtgctcccaccattagggtggctcttttgacaatgtgtaagctagtttgtaaactcctcacagacattctcacaagcgtgtctcctaagtattctagactccatcaagctgacattgtcatcctttaccatgtatggcaactgggaaagaaagggtgaaattctccttcctcagaagaaataattatatatttaaaagctacagaaaagattctaggagtaataaacagaaatagtacatttatacttgatatataaaggctactacatttctgtatgtaagcaataaatagaaatggaattaaaatgtgttttaagatgtaattttatgtgtatgaatgtttcgctatctttatgatgcacatcatgtgtatacagtgatacacactgtgtgtatacaattatgtacatggtgtatatacagtcatgacattgtgtgtatgcagccatgcacaccggatgtatacagtgatgcacatggtgtgtatacagtcatgacatggtttgtatacagtcatgacatgttgtgtatacagtcatgcacaccgtatgtatacagtgatgtatacagtgatgcacactgtgtgtatacagtgctctttgaaggctggaagaggaagatggaactggagtcacagagggctatgaagcacacgtgtgcttgaccttctggcggagcaacatgttctcttaactgtcatcagtcttggcagagcccctttccctgctgagctatctcagccagctcctgcctcactgactcttgactaggctggggtagctggccagccagccaaggatctcctgcccctgccttccaggtgctgggattgtaagctagtccgttttcacatgggtgctggaggacagacacacgtcctgtacttgcctgatgagcgcttgaccagctgagtcgctgagtcatgtcctctgttctgtagaaaggattcttacattaaatcagagcagcatggtgccctgattccactcaggcaacagcagtgagcactcagagaaatgctatttcatacagcttgaacaacgtccttgtagaccttcatcccacaacaacactgaagacctccatcccactgcagctgagtcttagccacggtctcacctgcagactccagagcacccgcatttcccactgcctgtgtggcatgtgtgatgccagttgtgagtcagcagttgcaggaactgaggcaatcctatttgaactttctactcatgacatttgcctcagtaccctttgtttttgtttttatttttaatttatttttcaatttgcataccaaccccagttcctcttctctccccttcccataccctcccagtctcctttcccacctcccatccactctgaatagctggtaaggccttccttggggagtcaacaaagtctgccataccaagttcaggtaggaccaagcccctcccacctgtatctaagctgtgcaaagtatcccaccatggagaatgggcttcaaaaagccagtcgtgtacctgggataggttctggtcctactgccagcccccaccccacagatcaagacacataactgtcgccaacattcagagggtctagttaggtcccatgcagattccccagctgccagtccagactccgtgagcgctcactaactcgggtcagctgtctctgtggtttccccatcatgctcttgaccccccttgttcatatgatccctcctccctgtcttcaactgaactccaggagctcagcccagtgcttggctgtggtcactgcatctgcttccatcagtcactggatgcgggttctatgttgacaactagggtagtcatcaatctgattaagggggaaggcccattcaagcaccctctccgctattgctaggggtcttagcctgggaatttctccagcaccaggtttctccctagccccataatggctccctctatcaagatatctcttccattgctctcccccccatcctccccaacttggtcttcttgatccttcgtgttcccatcccccacgccctcccttccatccctcccatccctcccagtttacccaggagatttcaaccattttccttcccaggacccttcatgcgtgtccctcttagggtctccctttttacctagcttctctggagttgtgattttttttttgaaactacacagacataatcctgagttctgcttttaatatacttctgttactagtttctgtgtctcttcaaactcaagtccccagtattgtggacctagagctcccttgactttttactttgtttggcaggtggtttatttaaaaagacaaaatatataatgtaatatataaatggtataagcagaaaaaaactaatggttaagactcaggcctgtgtcttaccaaccagttatgaggccctgggaaaaattcttgactgccttgagccttaactttttcatctatttaattgccctaggtacttctctctgtgtctcacggagcaaaaatgtggtgatggtaatcacccagtattcgaaaacaaacacagaggtgatctttataaacatagttttatttcttttatttttgagattataattatacaataccctttccctttcctccctccaaatcttcccatatacccctgcttgctgtctttcaaattcagggcctctttttctttaattattgttacatatttaatatatgtgcacatatatgcttacatcttcttaaatataacctacttagtctatacaatgttacttgtatgtatgctttcagggctggcaatttgctatcaggtaaccaagaagcatatcttagttgtctgtagttctttctgtagaattgagtctttgtaggctttcctctgtcaccatagcttctcattgcttcatccttgctcagatcatgtttagaaaatcatgcttttaaaactttatgggtttagcttctggcattactaagagacacagtctcacagcaaactcccatatcctcctatggctcttaacatctttctgtctcttccacagtattctctgagactcaggtacaggagctgagttgtagatgtttccattgggactgggctccacaactctgtatttctactggttatagttttctgtgatgggttccatctgttgcaatgagaaatttccttgataagtggtaaggagtgtatttatctgtgaatataagcacaaaaatttaaagcacagttagggattattctagtttagtaaaatgttgattgtaggtactccacgtttgttgatagttgttttgttgggttttgtcattctgactgaggaaagagagataatctcaaagttgttttgatttgcatttctagaagtcttgtggtagaattttaggctttccagcaaaatggagtacaggttcataaagtattcacttagaaaattccaagtttctttgatgtctcttgtaatgtttccctgttcatttctgatttttttttccatttggaccctctttttctcttttggttagttggaacaaggatctgtcaatcttgtttatcttctcaaagaaccagctcctcaactcaccaattctttgtattgttttctttgtttctgtatcaccgatttctgctctttcttctgtcttgctgttgattgggtttggatttggtttgttcttggttttccaggacaatcattaagcattttatttgtgctctttctgattttttaatgtaggcacttagagctataaatttcctttgtaggaatgctttcactgtgtcccagaggttttgttgtattgttccaggaaatttttatttatttcttgattttcttctttggtccattcatcattaagtaataagttgtttaatctccacaagtttgcatatttactagacacttgtttgctgtcaatttcaagttttattacattgtggtcagagaggatacaaggagttaatgtaattttttaaactcataaagacttgttttgtgtctcaggatgtagcctattttagaaaaatctccatgtattgctaaatagaaggttcattctttactatttgagtgggggtattctgtagatacctgtcaagagcattttgttgacaggagtttctgttctgcctcatcctacaactgttcagtcccaaataaacacaaagaggcttatattaattatgaactgtttggatgatggctcaggcttcgtattggctagctctctcttaattagtaacccatttctattaatctgtgtatctctacatggacttggcttaccagtgatgcccagacctcttgcttccttggtagctacatgacgcctctctaactccacctattatctttctctatccctgtttggatttcctgcctgactaaatcttacctgtccattggtcaaaacagctttattcatcaaccaattagagaaacatatattcacagcatacagaaggatgtccccatcaccatttgttgtatgctctcaattaatcctgatgtttctctgttttttgttcagatgacctgtctataagagaaaccatgatattagaatcacctactattaatgaattgatattaatctgtgcctttaaaatccagtgtactttttatgtaattgggtattcagagtttggtacatacacatttagaataataatatcttcttacttgactgttctgttgagtagaattgaatatccctcttgaattcttctgattaattttagtttatagtctattttgccagatattaggataacaatacctgctcccttcctcttcccacctggttggagtgtgtttgtctgtcattttactctaatgtggtatctatctatttttaaagctgtgtttcttatggacaacaggtagatggattttgcttcttgatccatccagtcagcctgtgtcttttgattggagaattgaggcccttgatatttaaagtcattgtcgaaatgtgtgtgttagttgtagtcatcatgttgttgattttggtggtgtgtgctcagtgatacttggtgttttaataatcatgacagtatttctaaagtctcaactatgttcgtttctcccttcaccccaaatcattgtttcctatattttctttaggcttagtttgttggatataacttttaggctgtttatatagtgcaaaatttttccttttccttcagttatggtggatagttttgctggtttcaatgtttgcaatagaactacatcactttctcccctccctctctttttctagcccctctcagctgcccttcttaagcccctcccatgattcctattctcaagttgacagcctctttttcttttattgctactgttacatacatgtaggttattgttattgttatatacatgtgtatgtgtatgcataggtctttttcttttattgttattgttatatacatgtatgtgtatatgtgaatatgcgtaagtagaacctcctgagtttgttttattttttgtgtatgtatggttccaagctgaccactctgcattcgacaactaataaggagctcatctctgggaaaagctaattcttctcctagaagtcattagttggctgtagatttttgtctaggggtgggacccctcaaatttttcccccgtctgtgctaacatatctattgatattgccattgttttgatcttttatatgtagccatttctggagagagtgtttcatagcagacttcctggtttatgtatgtatgtatgtatgtatgtatgtatgtatgtatgtggacacatatatgtatatacatgcatgtatatgtattgggtataattttaggtaaatatcaaatcgctttggtgttatttctccctcatctcttctgtattgaccactacaaaaagaaaaactattctaattggaagaataaattaatttaatcatcctcaagaactttataaattcagaacattccatatactttataagaagaatcataacttgaagatcattttagcactctaattgaaatcggaccttatcactaagtttatcattcatgatcttgcaacttgatcctgtagtgcaagctttttttcaaatgacctcatctttaaaagcaaatcgtctcaaaattccaagaaaagatcctttcctgccaaacacatcataaaagcagaagacacggtgacaccatctttctagagttttccatggccttaaagttgtcttattgagaactagtaatcatacaggcatggttgaccccagcctggaaatgctgacatcggattttcacaattgttactattacgctatggctgtcatgtcatacagcaacacaatgtgcttagatcatacccaccctttcacaattgttacttttacgctatgactgccatgtcatacagcagcacaatgtgcttagatcatacccaccctttcacaattgttactattacgctatgactgccatgtcatacagcagcacaatgtgcttagatcatacccaccctttcacaattgttactattacgctatggctgccatgtcatacagcagcacaatgtgcttagatcatacccaccctttcacaattgttactattacgctatgactgccatgtcatacagcagcacaatgtgcttagatcatacccaccctttcacaattgttactattacgctatggctgccatgtcatacagcagcacaatgtgcttagatcatacccaccctttcacaattgttactattacgctatggctgccatgtcatacagcagcacaatgtgcttagatcatacccaccctttcacaattgttactattacgctatggctgccatgtcatacagcaacacaatgtgcttagatcatacccaccctttcacaattgttactattacgctatggctgccatgtcatacagcagcacaatgtgcttagatcatacccaccctttcacaattgttactattacgctatggctgccatgtcatacagcaacacaatgtgcttagatcatacccaccctttcacaattgttactattacgctatggctgccatgtcatacagcaacacaatgtgcttagatcatacccaccctttcacaattgttactattacgctatggctgccatgtcatacagcaacgcaatgtgcttagatcatacccacccttctctccccaccccagctcttcctggaccctcccacatcttcctcccaacttcatcagcccctccccttcctctgaggtaaaagtatagtgtctggttttctggcttgttgttgtgatgaattcccttcatgagctgagctgagtgtgtggccaccactcctttcccttcttagtcacaaaaccagatcacctgagactcttttcttgtttcgggaaggattctgatgatgccaggtggttcttgtgacctccttgccccagattctccctaggaacaccatgagcctctctttggaacttgggggtttgaacaccactgactgtggctcatctaggattctctgtggtcctgttacctttccctaaagcagtacatgtcattgtagactaaaaataacctgccgggtactctcatttatctgatgcttttcaaacatttgcacagttgcttctctttttccccaagtttattctgtttgctttccttctcttgcgaggggtctggacagtttccattgacagcattagaggattccccactcaacatggaacctcactcagggtgtcctgcccatattcattacattcccccaggactttgttcaaatgcttgacaagaaacagggccaagaggggaagggtttatccagggtcctggtttgaagttgctgcctatcctggagggaaggcatggccacgggagtgtcattagcctgtgctggtagggatgtgaggctgcttgtccacaccttggaattcgagcccagcctcaggacccccaagacctacccccagtgacccactttttcctgaaggtatcacctcctaaaggttctagacccaccaaatggtatctccaccagggcatgagtgttcaacacaccaccttgtgagacatttcatattcaggaagtcgtactgccccatctattaagtgttccctgctgcagtctcaactactgctgtcagtcaaataaactccccggggtcggtatccaagcccccataattctgctcatggacctcgctgtctgtggctatttctctactagccatctacctgcatgcagctttaaacagttccactactctttagacagccaccttccacattcaaaccagtcttcggtggactagtgcacacccagatttctcaggcaggagcattagctttagctcggctttgagggattctgcactaaatcacacacagaagcctacgatgaggtgaaactgagttcacacaagcccccagatggagctaacaactccactctaaccacaaccagatctgaacccttccccgatggatccagcatggtgaagacgggcgggaacgttgctgcactgaagtgctgggaagactttccatcgtaaaactttatttctgtttagacttattttctgggaaatggggagctcttgtttgtttgaagtctttttttttcccctgtagtacccaccatgggtttgagcatgatgtcctggaacaaaacattcccaggagaacctcgagcaaagagacagaagcaaggtcgtttttccaaacagccttggcagttagtctgtctccaagtcttctaccagaagtgattcaggttcaactgcagactctttcaatgtgacaggacaccctacctgctcctcctttgttattaaaatgtgcaacccagtgactttacggtggggtgaggtgggaggggctgcaagatcagctgtgagtgctaattacatgttcctcctagctgccttcacacagaggggcactgaatcctccacagacaacatccctgggaattctttgttccagtagtctgcgagtttttagttttaatagcggaagggagaacatcgatttgttgaggctaaaaagaaattaaattggcaaatgagaacgatgccattcttagcggacagggccagccagcatctgatgtggctaagggctggaagtgtccagatgcctaaaggagccaatgattacgatgggaacagtagcttcatgtaggcagggaagtcatcagtggagggagggccctccagactgtgggaacacagggccacaaatgacttgacagtcacacagttcagggaaaggtctaggtgaagccttgaaactcagtgtccagaagaacaattttagaccaagtttgaaggctgtagggttaagaggaaacacaatgaaattccgtagtcatcaaatcttcagcacatgcatgtttggtaacttggcctcactaagcttgggtccatttttcagccaacttattttaattttttgattaatgtgtgtaccctaggccagccttgaacttacaacataacctaggctgaccttgaactcttgattcttctgccatcatttctccaggcatgcctgcaccaccacaggtagctaacaaatttattcttcaaagaacattttaatctattcaaatgggctccataaccctatgttttgtctcttatagtaatgaagactgttaggctcttactgaggactgtgaatatagattatcctgtttgacactgtgatctgtgatctgttggaacttgtcaactgctgtgcagattccagacagatctgtttacatcaggtcacagaaccagaaagtgagcctaaacttaggcagcatgacacccaagctgatacttagctgtttcgacagaagacatgggaaagaagactataaggacttctaatgaacaaaagaaatgagtcttggggaggtgggcaccgccatttaacagtgctttggaaatcatccaagcagtgataattcgaatgattataaccacagaggaatgtgaaatttactctgtgagtgtctctggatgcactgaggagactgaatcacagaagcttgaacatgacagcactccctgcagaaggctgggaaatggtgatgtagtagatggggacatgatttaacgcaggaagatattttatgctcagaaaatagtctcacattctgaagctctagataggacctgagcaagctacatgtatctggagcaattaatgagctgccttgccttcttcaggtcatggaaaataaggtagctagactccagaatttcagaaacaaaaaacactgaagatgaaataaataataccctatattattaactttgctatgattttggaaaagaacatcatgttttatttccagtcaatgaactcattcaacgtggagaatattgctacttcccagctaatgggcaggaagcaaaggcagaaaagaatgccaagtgtttcctataaagcatttgttgtttatgtcgaaaataattttataactaatgaatgcttactgggaattcggggaaatgaaagatactcagtaccactacccagttattgtgatttattttattgttttaaagaaaactccagagtaaatatgaggaaataacctgagatacccagggaacgacagagacaccaacacctacctgctctctttccacttcctggactgaaggactgcccagcctcttggctcctccccttttccccgtgtgtcttctgtctccctctgagtcaaccagaaactctatgttcccagctattggtgggctcagagcaatcaacacaaacaaagctcccccaacaccagcagcatcacttgctttttcatctctgtagcagagactgacttagctcatggtttcaaagggttcatgcttggccttgcacagttgggcagaacatcactgtggcaagagtgtgtgacagaggatggctcttcatctcgtagcagataagaagaggagagagaggaaaacaggaaggacaacggacaagatatgccaagaacatggggcccactaaccaatattttccagttagggtctacgtcctaccatttccagaacattacaaaataactcttccagctgcaaatgaagccctaacacagaagcctttgtggaggatgcatcatagccaactcataatatcagacagaatgctgacacttgcaaagagctgtagttagcagacatcttgtcttgttttcaatatggtcaagtgtagcagtcgtgttctagacttgaaacccataccaggttccaccaaaacatagcttcactcaaataacatcttcctggtttcagtagagaaaaggcagtcatctgtattgctagtactgtgcttcttaggcgtggtctctggtactccagactgacttgctctacaggtggtgacaaccttggatttcagcagatctgtggccacctcccaagtactgggatcacaggaatggaccatatatatatttatgaggatgaaatctaggacttcaaccttgctaggtaagcactgtaccaacggaggggcatccccatcactacatgggctgtgtgtgtgtgtgtgtatgtgtgtgtgtgtgtgtgtgtgtgtgtgtgtgtgtgtgagtgtgtgtgtgtgtgtgtgtgtgtgtgtgtgtgtgtgtatgcgtgtttctgtgcacatgaaggaaggtacctgtagaggccagaagaaggcatgagatcccctggaactatagttgtgagccaaccaatgtagacactgggaaacaaactctgctcttttgcaagaacagcagtgctcttaaccactgagccatctctccaatcctatagactgttagtcttgcattaactataagccctcctgttagtgagttgacttgccagtctccacagggagatttcaactgaaacactcagattaaatctgcaatagtgtgacacttcttctctgtggcacttttgtaaccttggggtcatccatttgcagaaataactagacaaaatgccttgagttgaaggtcatggatgtgtgggtgtggagaactctgattgtcccaagttagcactaatgaaattgcctgtgctggttttcactggttaaagaggcttgaagatcctgtgtgtagtgatggcatcgaaggtgtccagtccttaccttagcatgcccagccctagcatcctgcaacagcctgttgtggccctacatactttacacactagctctggatgttctgtgaatttccttcatgtggtgtgtcagcccttccacagtttcctctctgggctcccctcctgttagccctggtccttctctctcggtggatccctgctaccacccacgattctggcaaacacagcatcgtccagatgtgtggatctccccctatcaagtccagatatctggaggccaaataatggactgtgttttccatctgagagtttgcctgtgattcaagcagtctttgtgttgtcggaacaagctctgggaaccatcattttatctgtgaagaagactaaaacagacaggaaggtgaaggactccagggtgggtcaaaagttctctctgaactgaacctgtagtcaggttgagataagaaacatgaacaaagatgtgtctgtgtctcaagatgccttgtgtttagaaatacactctgggagaggtgaaatcatgatttcctttgtaatatgcttgcattcaagatgtaggaggagaagtttcctctttaaaggcccattagccacaccctttgggaaaaaggagaaactcagatgaaatgaaacacagtagcatgcctcattcttggatgaccaaaggaaatatggattctgaatataggctgtgggtcatgtctgtttgaccttttcaaaggtgcccccatccatctctgagaatggaaattgtatttcagatagcatataatctcaaaattgcaaataaattattcataaacctaaaaccagtaatcctaagatgtgtatatgggctttctgatcccagatttgtaactctcagatcaattcaaccccttaaaacttttacagccaattttttatacctgttctccctccaaaaaatcagggcacacacatgcaaacacagagcttaagaaatactgaagcaattctttatctaaagcacaaaagaaatgtctgtcactgtggtttggctggcactggggatgcaggagttgtacctgattagtctccaaaggttttgaatttcagtgttaggtgctctgtgctttacccataaatatgtatattttagtcaaaagatggatttcagttttcccgtaggaaccattcttgttctccatgcagcttaaattttcagatgagtttgtcaaacatcagctgaagaggaatgagccaggcaccttggtacagtgcctacagtcttagaattggggacgggatagttgtaaattgggggccaatttgtacaactcagcaagggcttgtctatggaggtagcaaagtccggagagatatacaacaccctcatgctctgagtggaaaggcagccgtagagccctcagctatgtagaaagagctctgctctgtttttgctattttttattattataaaagaaacacaagttaaatgcaccatttcagacagggaattatggtctcattaactgtattcacactgccataccacatctttagaactctctcagatggcatgaaagctccgtgctcttcattgacttgcccatccaacccctggcagccacaatccaacttctcgttttttgtgagtgagtttgtgacttcccatgtaggtagacatagatctctcagtgattttaggtcctatccatcactattagggactcatgctgtgcctttggggtgccagctgaggtgggtatgggagactgatctcctgtgtcgtggtttttgcttttgtggcattgatgttccacatttataagtgagatctggccatggttctgattgtgctggattgatccagttgtgagagttggggagagaggaatggcacaggctgtgtctctggtgctctggcgggttgcatcaggcaagcctttctctaaggacatgctgatgtccccttgggagctccgtggttgtggtggaatctgtctctggtggcatcagccttctggcgttcagctgccaacaatgttgttgtcaagaggtgtgtggaggctctgggccctttccttagctcattagcccaccgccattcttgggggtgcttttgacattcttctaaatactgaaacactttttactttgtttatgcatttgtgtctgtgcgtctgtgttgtgtaagtacatgtgtatatggatacctgtggaggccagaagaggatgtcagatcctctggagctggagttcacactgttgtgcactgccatgggtgctgggaactaaccttgggtcctccgaaagaacggcaggcaagttctgctctgcctctcccacccatgtcctttgttaccaagctcgttatttctcttctatgcctgacttaaaatgcatgaatcattctctatctatcctcttggtgtctgtcagggttttcacctagccaggtcttcttttaaactcaccctcttgtttaggcagggcaggaagaagctaccattaaaactgcaagggttcacccctgaacccagtaattcctgaggtccttcccagtccctacctcctgatgggagtgacaggagccactgtgtacacaatcggctcaaacattttattctaggatttttttttggtagagccctaagtgatgaacatgttttcagaatttgcaatgcatcttccttccctccctccctccctccctcccttccttccttccttctttttttacctaactctacacagtaaacaacttttcatttaaaattgccaaagcaattctaatttctccagctggcccttgaccagagcactggtagcctattttaaataggttcttgttcatgcctctgccctccaccccagtttatgagatgcctttggctctaactaacaatacagcgagttggaaattcacagtcattttagtgtcagtccctccaattacttcaggaatatatcaaactagtatcttagtatttattcattataactatggaccacatcagcagcatctcattgtactcacaactcataatattttaaaagcaaataaaactaaaactgtaaaaaaaaatttaaaaactttcacataaacaaatttgtaaatttatgtatatgtaaataaaacaaaaatgtattgttgtaaaataacaaactaaatacagaaaacaaagatgatttgaaaatggtggatatcttaagatagtgttatcttggttgttttttaaactttgaatttttaaagatttatttatagctatcctagcacttggaaagcagaggtaggtggatttctgtgaacttgaggatagctgatccacacagtgatttccaggacagccagagtaaagacctgtcttgaaaaaaatattatttttaaattttgtgtgtagagtatggggtatgttggcctgttgatgcaagtgcctacagagtccagagagggttccagacattcaggaactggggtttcagaagttgtgagcctcctgatgtgggtactgggaaccaaatttaggtcttctgcaagaacagtccttgctctgaacattggtccatctctctatccctatttcagttattttaatgtacctttaattgccagagttcacttacatgtacatatgcatgtgtgcttgtatgtatacatacacataaacacatacacgatgccagatattttgtgcaaaatattttaagcttcaccccccaaaaatccagattcttgacttccaagtggactatgggtgatcaagtataccatctacctaaaccggtcctccagcggcgacgacctgagccacctcaccaacctcaacaacatttaatacccacaaaaatgcaggtctcaaacacacatcacacagagaccctgcacacccaattcctctttctctttaccaccccttccccttcctgtcccagagagccttcttcgtcaggagaaagaaaagtcttctagtctcatttcttatcatgcccagctctggctctgccctttcttcccttctcctcctcccctcccttcctcatccccaccccactccttccttataaacagaacccttgcttctcatctgctggtagttttcacctcctgagaggacttccttccattaattctatactgctttctccacagtctctcacttctttctattccaggtacagtcagccctcggtgtccatggaggactggttcagtatcccccactatgatgggggatgtccttctgtatctatgattttcttattggttgatgaatgaaacagggagtataggcggggctaccagaatgatggggagagaaggcagaaagaagccaccaaggagacgccatgtagccaatgaaagagtaacatgctggagcaatatgggtaagccacagcctcgtggcaatacatagattaatagagagagctagccaataagaagcctgaaccattggcctaattggatattaattggtttctaattaattaatagaaaaccattggtttctattgaatataagtctctgttaaatggttgtgggacagaaactccgtcttcaccattacacacacggtgatacccaatctgtggatgctgtggagcttccagaagcacagattagttagtattcatttgtaacctctgcgcatcttcccagataccaatcacccctgctcatttcagatacagtctgctgaacattttgatctgggcaggcttgctgaatcctagcctcagagcctgcacagactgcggggctaggtgactctcagcgctccacatgttttttcaggttgcccttgatgctcctatttccctgtgcacagtgtcttcatgctatggtagcatggaccttgtggatccctcatgtttacactgattctctctggctttgcagcccagctccaccacccttactatgtggcttccaggaaggcgtgtgctgatattataaactaacggtgatatatctggtgtttgcctactgctattgtttccaatgtcaaaggctgcccatatttatgcccgttgttactttcttctatgacctgtgttatcatgtaaagtcatgacattggtgtgtaatgatgtaactttgtgtccttggaagcgactttaactcatttaggaaccacactcctggtccacggcccatgataccgattatcagtggcagggcctgtggtgcagcaagcttggcttaaacctccattgtgtgtgctgtgtcgccttgaagaggacctgaggggactgagtgacccttgtggctctcctgctgaataggagccttagaattggagagaaactttcaccctctacttcagctatgatttccctgacagaggggaagcttgtgaggggattctggctgcagcaataaatcaggggaaagtttcccaattttattcttccccctcccccctcacatacctgaggaagaactcgggaggagccggagtttactgcagggttaccagatttgggtctggtgggctgtttctgtttgaaactttgggcccaggctcaggcttgtcaccagtgtggtagggatgggggcaggtagctgctcacttcatggccctatagctggcaagaagcagggagcgaggaagaggtcatcgttagaagtgtgccctagtgacttctctgccagttcacccctcctccgaaggtttccacggcctccccaagcagcaccacagcctggagcttagtagtcagccatgtttgcctgtgggaactctgtcatattcaagctaccacaccctgtaactggcttgtgtctcttcctaggggtggggaggcattgactacaggattctgtttattctcagcattttacctagatgtctgctttgcaatattactagtatgtattattttaacatgcttgtagaaatctacatgcagattacaacaaaaagctttatttgtccttcatttattcatggaaagaacattaggacaggatagtattcaaaagtcttggggccaatgcattctctgaagtggctatttgatctgtgcaggaacttggcaggctgtgtgctacagcttagattttaagtatcataccgaaaacataggaaagcatggatctagagattccgttctggctactctgctgtttcacagcacagtgtgtgaggatgaggagatgggagatttcatttctgttttttgtttgtttgtttgttttgattttttcaaacagggtttctctgtgtagctttggagcctgtcctggcacttgttgtggagaccaagctgggctcgaactcacagaaatctgtcagcctccacctcctgaatgctcaaattaaaggtgtgtgccaccactaccaccatgtggagatttcatttctatgggctgcttttcttctgaagtattgggacttaatggccttgaattggaagagtagagttgcagggagagagcaggctagacaccaaagatgcctgtgagtaggtgagactgccagaaaatccagctggttaatgagattgggaatttggcatgaaggagccatggtgtggagagacaattaggaggattacggtggcagagttttttattcctgatccaaggatggcattctgtagccacatctctcctaaacttgcccaaactccccttccatcctcttccccctgggttccatagaacactcccaactttaaggttccccatggttcatacttcatcaggtaacaaggccttagcaattgaaattccactacacggaaggagctgaagtcatctgtgaccaagctcaagctaaacccctgggggagtgcttttatctttacagtacgtgaggggacttcacactggcaaggagtgatccagaaaccaaagatggtgttgtagacaataggaaatgggctaaggaatggtatttcctgtggatatctacaatttactgcatatgaccctagcagaagatttcaaagccatggtcaccaaactaaacaaagaggtcaacctactgctgttgatgaatgttgaccaatagacacaggagaagatagaagcttgtccctgcctgtctttgatgctgttgttgtaggaggagggcagagggaggagaaactaacaccttccgtatcttacactgtttgaggtccttagagtgcagccaggcgactgtgagatggttgctgacacactagacacagacgtgcaaggaggcttccatgcaggactactgatccagtcagaatcaacaggagtggaagtgacatcactcatgcctccctctatgatttccactgtgctggaattccctgctctcttgcaaagcaaagatggcaaccaacagagcatgtcagtgctgaaaacgcagaagggcacagcgaggaggacacaaccagttgacaggacaagaactaaattctgcatgattgtttcagctctaggaacaatgtgtgtgaggggttcagagccttgctgtgaaagtcccccaagcccttctgctgcggacaaccatgggcttgtgtctgtatctgaactccagttttcagtactggagtcagaaaatgaacacgagtgccccaagggactccaatcccaaatggctttgtttgcttgcttgttttgaagtcctgtggtgtgaaggaaacaccacaatgttcacagctactgatgagccaagaaagaggctggtgaatggccaggttcggttgagatgtctggaaagctgttcaccttagaggtgcctgtctgtgcatctctacccaccacccattcctctttcactccctcatcacctgagctatttcccttctacaaagaacctgctgtggtgtcttgagccagtgatggtggatggcacatcctgacatatcccagcaaggttctttgctattggaacttctctgtcacattggaggaatgtattcctgagcagcagtcattgtttaagacctttaaaacggtacttcctttgtctttgagctttgatagctgaggctgcattcttcatccctattttattcctcaaacaatgcatctttgcttttctctggattgctttttacaaattcctttgttaactatatgaaagcatcagtgctacaatgtgacgggtgtgtttctcttttcttttattctgctaactctgttacagagtttcttgaacattcttgacatttataatcagatttagaatatttttagccagtttctcatcaactgtgatacttcttcctttcagtgtttgtgggattctgttcatatcaggtcatgtatgttagatgcaagcccacttgccttgtctcttagtgttcctctagacatgtgcatgtggatacctttttatggacttcatttccagaggttggagaggtgactcgatggtgaagagtgattgctgctgttgcagaggacccgggctggttcctacaactcacattggtggcgcaaagctgcctgtgactctagttctaggacatctgatatcctctggcttccacagacccacatgatgcacataaactcacacatacacacacacacacacacacacacacacacacacacacgcataaacacacacacatatacatacacacgcacacatacacacacgcacacatacacacatatatacacacacacacacacacacatgcgcacacacatacacacacacacacacacgcacacacgcgcgcacacacacacacacacacatacacacacacacacacacatacacacacacacacaatttttagagctttaaacctttttaaaagaagtaaagaaatgaatactaattctgcttttaaaaaatgtttttaatgtgcatgaaaaccatagtgttgccaatatctagagatctccatgttcttttgtaaattggataacataatagagataaattatcaaggaatctgtagtgagagatattttgatctctgtctaaatgtaggttataattttccatttgttttggtattaactgtttctaaagagaaattcttcctgtaagattcgagcatggagttggggagctgggtcatcagtagtgtttgcctttgggtctggggcataaggactcgagtcaatccccagaacagacagcaggcaactgtagtgtcactcacttacaatctagcactggggctggggcggagggtggcacagagagttgggtcctaggagctcaactgtcccaaccgacaagttttaagacaatgagagaccctgagtaagaaaagtagacaatgcctggggtggcttgggaggttcatctctggtctgcatacacatactcacacacacgtgtaccaaacacaaacatatcatacatgcacacacacacacacacacatatgcacacatacacacatgcacacacatacatatatgcacacatatacacatacacacacacaggcatccatgcacacatacatgcagacaggcatacacaaaggattaacaattcagttcagctgactgtttgcttgatggtaaaatccatgaaactaaaccagtcagtaggtgacacaacctctacactagacttcctgaacttttctgtggataacaggaagtgggggatatggcaagaggaaaaacacaattttcacagtaaaaatacacgtatgaaagaaattcaagcatgccataggaatagatggaatgtaaacgaatgaacagatagcaggtgacacctgggtggctaagacactgagcagtgacatctgcacagctgacatcacttttgcctccactgtctcctctgagcccagcacacacctccgagccaggggcatcttcagcagcagccaggttgtttttgggagactcagtagcctatgtgatgtgtgttcaaatactgctcttctcgggaattcaccaagtctcacaatattcatgactctcgttggtggcactaactgcgatgggaacactaaagttcagaataaaactgaaatagtccccacgatgggaatgacagttgtcaacctgacaggatctagactcacttaggaaaaaaaacctcccagcatgtctgtgggcaaatttatagatgagggagggagagctaccttaaatatggttggcatcattccctcagctggggttcaaggctgtatgaaaagttggaagtggagtagccattaggggtggaaaatgagggtgtagctgcccagtggccataggtgaggctggatgcctcaaagtctaacctgtcacagtgaacctttgcgtgttccaaggccttacagcagtgccgatggcagaagatgctattgacatgtgtggttgtcagggcaggtttgtgtgatttcacattattaggttaatgataagaatgtcctacagattgtactctggtggcgcagatgccttttgatggtgaactgaggcctagcagctttccagacagagctgtgttgaattagcaaagattttaccaagcacagagctgaactcagtagtgcgatagcctgtagcacattctagaaaactaccccaaccagccaaagcaggttgggagtttagctcagtggttaagcacttgcctaatgagggccaggttcagtcaacagccctggagacaaacaagcaagcaaaaatgctaaccaattagccaaccaaccaaccaaccatctaaccaaccaaccatctaaccaaccaaccaactaaccaaccgaccaaccaacaaacttgaagttgcccatcaaggatggaaccaaatccttctgggaagcaatgcagaagccagactgaagaacagatccctgtacttgaacttcacagggaagctgttgttgagtagagcgatgctctcagactccagccaggtctttcaagtccttgtttagagttcaaagaaaacttggtcaggccatatgggtctgtcagtttgtgtgatgacactgtaggagtctctttgtggggagtttctgctcctcctctggctccagggcttcagactttgccagggacattttagttctttcagtcagttgtctgaggcttcctgtccttgtgagttcctttagacctttccctctgctctgctatgacctgcctttctatagctttattctttacttctccattatgtatttcctttacttggattatatttaagtatttctcatttcacaaaatgaaacaaatagaaaaaaagctcctccttggtctagagtccttcattacttctattactctgtagggagacaccataacaatgcctcctaagggctggctacaggtgtgcccgaccacgcctgtcagggtgtagtcaaggggatgtcagagtggcatggtaaaggtttaaagggatagggaacgtacatggtagctctcttttccctgaaacttgcctgctggttggctacctaataaatatatatcccaaccatcacggactacatattagttattaactgtaatactactcttttttatttaaattagaagcaagcttcttttacatgtcagtcttagttccctctccctcccctccttccctcccccccccccactgatccctgattcccaacccctttctgctccccagggagggtgaggccttccatgggggatcttcaaagtctgtcatatcatttggagcagggcctagaccgtcccacatgtgtctagactgagagagtatccctctatgtggagagggctcccaaaattcatttgtgtactagggataaatactgatccactaccaatggacacatagattgtccagacctccaaactgacttcttccttcagggggtctggaaaagtcctatactggtttcccagcaatcagtctggggtccatgagctccccttgttcaggtcagctgtttctgtgagtttcatcagcctggtcttgacccatttgctcatcactcctctctctctgcaactggattccagaggtcagctcagtgattagctgtgggtgtctgcttctgcttccatcagctgctggatgaaggctctaggatggcatataaggtagtcatcaatctcgttatcagagatgggcatttaaggtagcctctccactattgcttaggttgttagttggggtcaaccttgtagatctctggaaatttctctagtaccagatttctctttaaacctacaatggctcactctatgatggtgtctcttttcttgctctcctctgttcttcccctgactccatcttcctgctccctcatgtccctcctctcctcttctccccttctctttattctaactccgtctcccttcccctcatgctccccattagcttaggagatcttgtctgtttccccttttctgggggaccatgtatatctctcttagagtcctccttgttgcctaacttctctggcggtctggattgtaaacaggtaatcctttgctctatgtgtaaaatccatatatgagtgagcacataccatgtttgtctttttgtgactgggttaccttgatcagaatcgtttcttctagttccattcatttgcctgagaatttcaagattccactttttttctgctgagtagtagtactccattgtgtaaatgtaccacattttctctatccattcttcagttgaggggcatctaggttgcttccagtttctggctattataaataatgctgctatgaacatggtggaacagatgtccttgaaaaatatggaacgattcacaaattttcatgtcatccttgcacaggggccatgctaatcttctctgtatcattccaattttagtatatgggctgctgaagtgagtacagcttctactattctttcgtgattggaaagcccagtataaccctgcctccagtcctatatacacaagatgaataagttggaatccgtacctggaagttattcatgcttgtggaaagtctctctccccttgttttgtgtgttacactattagtcagcctttctctcatacaggagagataacaaaaatctgcttctagcttatgcaagcctcacagagctctggttgtcacccacagagtccatagcaggggacaatggagaatgaggttctgtgacactggcttctattgcttctgtccatacctgggagtcacatggccccaaccttatgacaagaccaaagaaggtggaaaacatagctgtggtgtgtttcttccaggagacagaactatggggagaatgcagcattttctctattggacattgtgacttgattatcattttaattatcattttaattttgctagtttgtaaaatcttaagacacatgcatgtgcaacaaatgctcatctttatttgtcatgtttctctggttctttaacacagagcagtggggccggcattctgcaaatgtttaaattgtttgattcaatgcctgagtacttattcgttgagtgagtgaataattgaatagttgattatctattgtagttaaagtcaggtcccattgcctaagactagaatctcccaaatgaatacttctgccaggagacactctctatgggatcctaacacatctatctttctctaagccactcactgcttttgtcataaacaaatgttttgggtttgttcacataacaagccaccatggaagataggcatagtgtctccctccatggctgtttgcacacacagccttgtaaagtagacagactgccccacgaccaggagcaagctagtcttctattgggcataataaagaatacttctcactcaggagcaagtctaagcattcttgtggctctttctaaaagattcacagaccagagctcacaaattcctctcctccaatgcagatgttattttgacttcctctgcctcactctggcccagcactcttgccctccatcagcacccatgatgccagctgtaaacagagtgaaccctcaggacatgtgtctccatggctccttgtactagattgtttgtcctgtttcttggtactgatctcacttctaactgggtttgcgtcacatgcccttcatatccaaacctaaaatttcagccctccaaaaagggaatgttttgcaaatctctggctcttttgatcctgtttctcagataaatacaaaagtagttccctgtatttatttacctctttgcccacaaatctattttgttattgatgactgtggtagcttgaaagaaaatggcccccaaagccagtggcagtattaggaggtgtggccttgttggaggaagtgtgtctcttttgctcaagcttccctcagtgtggcagtcagttgactccctgttgccttctggtcaagatgtagcactctgctccagcaccacgtctgcctgcatgctgctgtgctcccagtcatgatcataatgactgaacctctgaaactgtgagcagaccaccccgattcaatggtttctttacaagagttgccatggtcatggtgtctcatcacagcaataaaaaccttaactaagacaatgacaaaacaattctagatttttgagatgtcaaaagctgttaccaccattatttccacacacacacactaaagtttcagagactctggtcctcaaaagctcagaaggcattagcaggcactgtgattaaagcaagctaacatgtgagaagttctgctgataggtggtgttcaaagcagattggaatgtttcagaacctctttctgcctctcctttgttccagggaagaaaactatttgctagagcacaggtgtgttgctgagacggcttccttgaaagaaaacaggccctgggctggaggccaaaggaaacatgttttccagttatctagtggaatgagccaactgaatggtaaaacatttgcaaagccagatcaaagcgatgcattaatgcatggatttgtccctctctgactttgcttatccacttactagtttgtcttctgccacaaatcacccactggtgcaaaacagtcaagagggaacaggatggatttctgaagaattcaatggttttccctcagaatgcatttgtgcgggcgtcatctctataaaactcctcaagcttcatccttctactcagactcgaatggacagagttattcctccacaaggagaccatagtgtctcaacaaagatggaggtttaagagctctgaccgacagtaactccaccagcagggagaatgtgttgaattttctctgctgttagaaaacatgactcagggcacagtgacttctggctgccgctttacaatagagaaatgatttccctccacttaacggaagatttttaaatggactcatctatttgttaatttccagcaaggacaactttgttttcctagaggaaattcaatcaaatcagccattaaaacctagtactttagatgttgtagaaaaattttctcttttcatttcaaataagaaaaatgcatgtgtaatatccaacagaaacaacagaaaagacacagaagggagtatccagtttaattttccagagattaggttttgtaaatgtgtttttaaaaaacaaaaataagaaacatgttaccatcaacatcttttgttgcttcaagccacagaaaatgaacaagcatttgcaatacacaagcagtgaggatgagctttacagacccaggagggaataacacatatgcagcatccatttgcacaccagcctgcaacagcgggaggtctccaggctctcagcaagtccagctccctgaccggttctagaagagaatcgggttttgatgtgactccaggttatggaataggagaacatgatacaattgtgtgaagaagcccaaacacaatctctcattgcaacttaaagtgagagcactgaatcacccccaccccagactctggggttgctggcactctctttgcatgcttcttcagagcaagaaatgtggagagaggggaagggctgtgatgtgggcggggtaagggctgtgatgtgggcggggtaagggctgtgatgtgggcggggtaagggcggtgatgtgggcggggtaagggcggtgatgtgggggggtaagggctgtgattgatgtgggcgggtaagggctgtgattgatgtgggcggggtaagggctgtgatgtgggcggggtaagggctgtgattgatgtgggcggggtaagggctgtgattgatgtgggcggggtaagggctgtgattgtacagtagtttctggcctcaaactctggaaactccagacctcgcctgtagacccacttcccttctgatccgctcatcggctcctctgtcctcctccccacaaacagcttgtgagggaaaagttgactctccctgctaggaagagtcattcccgctgggtggagttctgtggctccagtgccactcttcagaacgcatctacctgacatgaggacccaggctcctcccgagtggcgactggagccagcatcctccatccctttcaagatttttttttctgtccagagatttgcagaagtttgccttgtatggtgactagtattcatcaccttgccttctgcctctaatttctccttggtcacctcgaacagacagttacagtcccaacaccatgtcccactgtaaatttggctctaaacaggtgggggtgccagacgtgagggctaagcaggtagctagaatctccgatcttggctagtgttcaagtgaaacttatcttcttatcgtgattgtcactctgtcccaaccacaggaggctgctcccgggtatccgcttgtaaactccatcacagctgccttagcgatactcgctcgtccctcaccctctcgtttgttggattaaatcactgacacaggagttcctccttagtacccaaacctcacacatcagtttagatgagcatcacccatagtgctgtggctgtgtgctttccatcaaggcccagtcactggggattttcctgttgctgctgtaatcaaaatggcaaggaaactgaatcagcctagatgcccactgacagatgaacagttaaagaaaatgtagtacatagacacacagtggaattttgttcagccacatacacacaaaaaaaaaaaaccaaaataatgtgatttgcaggaaaatgggtggaatagaaaggaaagaagggaaggaagagaagcaacaaggaaggaaggaaggaaggaaggaaggaaggaaggaaggaaggaaggcaggcagctttgtacatagacagcccagctgtaagcataaccagcttctgacaaaagatgttttacttctgtcttcacgactgtttctctggcttcttgagttacccaaggccgcctttccatagcaaagtcttgccagtcttcatttctctgacaatccgattgtagcagaggttctcccttggatcagttcccattaccccggcaaagttgcagtgctaaggaaggagtggacaggagaagcaggggagggcactagttggtaccatctcccacatctgcgccactgattgggtaacacactcttctcacccagccttcgagaacaaggcggtgatgccttagtctaagagcaacacaggatttacctgtccagccaaaagcacccctgaagaatttgggcttcttttgaaaactaatgtgctgggtggggctgctcggtgtccagtactgcacgcagccagcccctctcgtgtgtccattggcaacttaggtcttaactgtgtgagaggcaagacctttataataacacattcaagagacctttaaacgtgaaacagcttttagtacaggatctcacagaaacagacagcatcacagagtaaaggcaccccaggtgaagtcactggccgtgggctcagtgtatattgatagaaaaacatacaaaagtgtcattttgctgaaaagcattatgtaagcgattatgtcattgctgtgttttctgcttagtcatgattccccagatacctggagttcagcatcatcttcagctgactcacagtccctgtatgtctgatagctttagctcatgacagatgtctataccgttgccatgtcgtctaagcctttctatggcctctatgaccttctgtccctttcacacacacgctcatgtgtaggtctgagtgtggagtcctaaggctgacatcaagtgtcttcctccattactcttactcactgagacagggtctctcagtcaaacccagagctcactgattggcctagccttgccagatggattgctccacagaacctatgtctctgccttctaattgggggaattacaagctggccactaccagagcctggcatttacatagcttctggacatcagaatcatggccctcaggtatgggcacatagcatacacttgacacactaagccatcatgccagccccattcccctttcatctttttactgtacttttactggcagttttacctagttatttttaacgattttgtgttttgtttttatttctcatattcatactatggtttatgcatttttaaattgggcaatctttttctttagtttctttttctcccttcataacactcttctctactcttactccttttatgcagccttacttttcttctattttcccttcttcttcttacattcatttattatttctatattttatatgcttctgatgcctcaagaagaggctgcttaaaatgtggataaataaggagaccatcatgctaattaaaataaatcagactcagaaagcaaataccatgtttcctttcatatgtatgtgtgtgtgtgtgtgtgtgtgtgtgtgtgtgtgtgtgtgtgtttgtgagaaggcaagaagagatattaagtatgagggtatgatgggggaggtccttctgtgtatatgattgtcttattggttgataaataaagtactgttggccaataggaaaacaagataggtgggactagagtcaaggaggattctgggaaatgtaggagaatgcgcagagtcaccatgtgagcctgggaagacaggacacttaccgctgtgtccaataagataagtcatataaaatatatagatttatgataattaagactgagctagcagatgagaaaacctagtcattgaccaagcagcatttgtacctaatataagtctctgtatgtacttgggaccttaacatggcagcggggcagaacttgggcagcctggtggaaagcgcccacatggcagcaggactcaggcagcttggtagaaagacttattgttacaggggtgggctgaagaaagtgtggtagagtaaacaaaagaaggaagctgaaggaagaactattttggctgtagaaggctactataccaacaatagcatgctaggagcatgggggaggggtaagaatgaaacagaagggcaactgtgtgtgaaaatgacatagtgaaactatccctttctatgcctaatttaaaataagcaaaaagggtcggctgctccctgggaaggccccactataaaactgggagagagagagccaaactagcagatgtgcaggccacagcatagaaccacaggaggtatgacaaatgaaagctgtgtgactcctccagaggatcccaactcctcaatctctctccctcaaaggtaacaatgaaccataataattcaaaagttcaggagctggggagagggctcagtggttaagagtgcttgctgctcttgcagaggccccggtttcagtgcctagcacccaagctcacaaccacccacaactctccttccaggggttccaacaccctgtggcctctgagggcaccaggcttgcacacagtgcacatccaaacatgcaaaccctcgtggacattgcattttccctgagggcatttttcccatattatttattgtctcctgatttattttttgttttcaaaaggctctttagaagccagtgaccctgtccaaattccactcccgggtaagagcccccaacggtcactaattgatctgtttagatgtatcttttatttattatcctcagtgctacctcccagtctgagagtttccgacacatgactttttatagaatactttgacagtctggagtgaggagcattgtctttgtgtgagacgtgagctggggagagaagaggttttaggtaatcttttggatggagccagtcaagcaataagctgaaatataagaggaacagcattcctttctacttctgttaagatcatcctttgtcttcaggtcttacagttcttggggaaagtgctttcctgagagtcactgctcaggaagaaattgcacgaagcccagggaagcaagtcacacaccaaggacagtggtgtagacggtggagatggtactgagactctgaggacagtggtgtagagtgtgatgagctgaggctctgaggacagtggcatggagcatggagatgggctgaggtgtaagctttgagggagaatgtctgggtgaatccctttctagagcctttttcttaaagtcccctagaacagtcaggattttgcacttaatgtttccagcaccagctgaactgctggtaggtcagcagcagacgctggagccagctgcagcaggtgttgcgcccagctccccggggtcccacctgatgaccttgggcaggctgtgaagcatcatttaagtcttggtttttcatctgtcagatgagtgaaaattcatacgtgcattccttcactggactaccctgagtgttcttcgtgtaataaacctcttcccgctgtggctaggaagtgcatgagaagctttccctacatggcaacactaagtatgaactctacacttttaagtcatggtgatcaggaaaccccgttgtagataatctacgaacccagtttcattcagcttcttgattaattctcttcagtcctagtttgaatgtgtgctgtgtcacctgcttagccattagtacatccaaatggcacttgtttacatagaaataaagagggactgtaaatgtagctcaatgggtagggcatttaacatgcatggcactctgggttcacgccacagcactgcaaaaacgagaaacggtatcatgcatctgtgatcccagtattgggaggcagggtaagatgatccaaagttcaaagttatcctcagacacattttaagttcaagtccagactgagagatatctgagattagaaggaaggaagggaggaaaggcgggaaggagaagagaagggcgggaggggagtgaaggaaggaaggaaggaatgaagggagggagggagggagggaggggagggagggagggagagaaggaaagtaagagctagctaatgaatacttgaaagaaatcaggttaggctgttctggggcctggtttgtatcagtcccacgctacaggggctatctattcccgactgatgtctttggggctgagatcagagccagctgaatagccccgggtccatccctgagttgggaattgtgctggaccgggacactcctagctacccaacagcgataaagatgagacacagacatcttgtcatttcaggagggctattagtccatgctggaaaactggagtctccggtttattcaagcatcctcttaagtagctttccaacagtgggggtgactatggaagatatctactatcatgcataaagctgatatcaaatatatccttttaaccctagtggcacacctaaacagtccctaggcatgtaaacaaaaacctcagaacaggtttgggctaggtctgttgttatgcaaactacgagacattctccactgaggccaagcaatctggcatgaattagctggacatcctaaagactatgtgagattagagctcctgggatagagtttgaggccagcatctgaaagaccataattgatatttttcgggccccgacaaggctgtaactaaaaacaggatataacacgcaaacactatatatatatatatatatatatatatatatatatatatatatatgtcctactttaatatgtgccactgttagacacaatgcaaagtggagtttgcatggagcaccaagtgtgtagtgagggtggaagactcaggagaggcctctcgggtatctgaggatagagtgtcctcagccagaatccttggatttgccgtgagcatgtgtttcataagtcaaaggtggcaattcagtgaagaccaggaaccttccagataatgtagaacacatttctgaatttatataatatgttactttaaatgctaggattcaacttcccaatgcggtgacagacaaagtcaccaagcatgaagtcttacgtgggtgttagctgctgatactttatggtaaatctgtgttcagtggggtgtggtctgagcttaggagctgaggaaggatgagttgaggggagctgggcaattaaagcaattttgaggagtcgtaggcagatgtaacatgctttattctctctaggtgaagacagactgccacacaggcataagcaggtgcccttcgggtttgagtggtatacttgcatagaatcacaccaaggtgtcactttctggaaatgattgtataatggattaaattatggcttactcagggttccctatatatccaatatcagtcctctttagctaacagttccccggtgtccagtgttagaagttcttagcactctgtgggtatccatcttgtcaccatattgtctaaatgttcacccaaccttaccagctttatgtcttccacggaagagtaaaggactcccttacggggcaaggtccactgagctatgtgactgtagacggaagagaagtgactctactggaaggcaggagccatgcttagcatggcatgtgggtaaacaggaagttgctaggatgacaatacatttgacaggaagtcgctatgatgacaatacatttgacagttgccttggagaattgtatcatttcaaatctttcgactaagttaaaaaaaactcccaagtagccgtaccagataagtatagtcatgaaaaagtaggctgcagtctcagtgtcttggtttcttttcttgttgctgtgattaatgagtgtgtacatgcccttgcacacacaggcatacacacacacacacacacacacacacacacacacacacacacacacacacacacacacaggatgaaggagtctattttggctcacaggaggggaggacagggcactgggtcatagggcatcttgtcctgtgacttctgcaatcaggatgcaggaggcggcagatgctggtgctcagctttgctttgcctttttattcacaactccagccatgagatttcaacacccacaactagaatgcgtcttgcaacctcaacccagtctagaaacacttcatagacacacctggagcttagtgtccccggggagtggcgtccagcttctgtaacacctttgccaccatagttatcatctcaagaagaaagataattaaggcagtgaaacttatcataaataccaaaaccacacttcatattctccatcagccttgatgtgagaaacgctcagtgtgacttcagccttgggttagagctggagataccgtgggttgggcttcaaggcagtgagactggctgccagccccatgcctaccaatcagtcttcaaatgcaaaacttgactagcatgatatagtgctctatgtatgcccatatttagagggtttgaattacctggtttcagggtttccctcctccctgaactaatgttttttcttctttaggtttcttcctattcagaactacactttgaaccatgaacttcctgggatgttcttgttcaaaacagaagcaaagtctggtgtttgtgtttgctgtgggtctccagtttgggggacaatgtatacttgacaggtcataattaaatatgaaaaacatcacctgctaatctaggcccttcacatgttaataaaaatggaattggataaaggcactcacctactactatgttgatttaagcgtgtcaacatgctacataatgtaatatactaattgtaaatgtagaatgtcatattataaaatcaaagccatattgcaggttaaaaggggaaagggattttatactgaatcatagggaaggaaaggttatcagaatgttgacttcagctcatgttactcagtggcaggtaattagttatttcaaattgtattctaatatcagatctcacagctttcattataataaatggggaagaaaagttatcactgaggtgcccttcagcaaatgcattttagctaaatgtcacacttgcaatgaccttgttccgacaggtcattgttgtggttttaatgtgaagtgtccccgcaggctcgagtgtgaacagttgctcgctggtcagcgaaggtctggagatgggggacctttaggaggcagctttgctacaggaagtggtgcaaagggaggcgaccttgagttcctgttcactctctcctgcctggctgccaatctgcaatcagctggccttcctgcctgcctccatgccttcccagtcatgaggggtgagccctttgagctgtcacaaaaaaccatacattgttccttggtggggaattggtgacagtaagtatagcaatgagaaaaataacctatggaccattctaatagagtgaaggctgagaaggatggagaactggtgggaagaaggggcatagggcattccacctcatgagccgatgcgggctcagcaagtgcaccggtgttcctaaaacactgcagttcctcggcagacttcaagagcctgagcttgcacgccaacaggcaggggcatgtttgagcatcaattagctgcacctgaggaattaattgactaataaggcgtgtccagtcaatcaagtccaaggtggtttttatgtccttcatgggggttctctgggtagtaataaatcattaaagcatgtatggtgtggataagtcctacagaattggagcagaattcatgcagagggtgggaaaacattttaaaaacagcttccgtctatcaaaggatttttaaaacataattgattcgatcccttatcttgaattgtgtttaatttcaaatgtgccagttagtattgaaagggatttcacaacccaatagggttggtgacccactgatttagttgtccaaatgttaagagcatctcagtgtgtgtgtgtgtgtgtgtgtgtgtgtgtgtgtgtgtgtgtgtgtacatgcatgtgtgagcatgtgtatgcatgcatgttgaagcagaagacaatcttaactgtgtttctcgggtgctacacaccttttttgagtcaaggtctcactgattcaaccagtctgactggccagctcctggggatctaccactttctcagggctgggattgcaagcacacaccaccataactgacatttttttttaaaacgtgggttctagttttgaacttgggtccttgtgcttctaaagcaaacacgttagcagctgaactgtctctccagtccccctatatctactatatatatatatatatatatatatatatatatatatatatatatgtagacacatatatatatgtggttgccacaacaggcctggcatgcttgactcccacaggatgatgactaacaagtgtgacaaggcatatgagactgagcagatggttctttggcttcattcaggggcctgtacagaatgaggacatcactcttatttttatggttcactgttggcaagagtggcgtgtttaaacaattaattattttcaaaacattaaatttgtatcagtgggaaagctaacaataagagtagaatataaatcctatgaagctaagggttcagtgtcatccagacacctagccactacctaatacacaaaaagaagatactcagtaaacttttgctgaatgagtgatgggtcaatgacaacagcgtgggttcaaatgcactgttagaatgtaaatgtctcatgtgtgcacgtattggcagcaagggcccgcactttccgtaagatcttggaaggaactgtgagatgagctgtgagcctcagctggaaggcctgagggaactagctgttcagcaagcaggacttgagggcctccatgaacttttcaaccctaacatctgatctcaaaaatctctttcatgtcaccctgagtttacacttcacagaacagttgtccctgaagcctcacttcctacaatgacattgaagcatagactgtatgaactagtaggagccaaaaggcagcctatgagctcttcacaactgagaatcttactctaatgtagaaagccccccttactcctgtttttctcgaaaggccaagccaccagaacagcccccacagcaatccacatgttgggcatttctaatgggggaagtcctaatatatatatatatattatatatatatatatatatatatatatatgtttctcttattggttgatgaaaacactgtgtggctagcggcaaggcaggaaggataggtggggctaccagaggaggagaattctgggaagtgtaggcagagaagagtcttgatgtgaggctgggaggagaggtcgggtcaggtgttctccagcaagccaagaccacatggaaatacatagattaatagtagtgggttaataattaagacagagctagccaataagaaaccctagccactggccaacaattttataatataagtctctgagtgttcatttggggcaaggcagctgtggaactgggcaggaatcctgtaacacatttccatggcagaagaagatgaaataggctgtaaccatttgtagtccatagtctcctgtgcccaatcacattacatatgtatatacatataccagtgtgtgtgtgtgtgtgtgtgtgtgtgtgtgtgtgtgtgtgtgtgtattgaccgagtaactagtggctggcacttagaagcactttcctaaggtgcggttgcataaaacatttcatgttcacattaaaaaatcattagttatagttgtataatgggcaagacacctgtatttacaaatggaccttggagagatggctccgtgagtaagagcactggctgctctggcaggaatccagttggggttcccagtgaaagaccccgaagggatactttcgtagagggagacccatacacccaggaatcagcgaggccacgaactggatgtaaaaaacaagaggctttattggagacgcaggtacctggggcgacttagcttctgtgtggctaagcgcctcgagccaagggaaaaggggtccttatataggaaaaaggcgcaagctaggagcagggattctattggataattctaatgaggcattatacagagctattcccattggtcaatgtatatgaggcgctatacagggttattcaaatgaggcaaagtacagagttattcaaatgaggtgaaacacagagtctttcaaatgaggcgaaatacagaattatttccattggatggttcaaatgagacacagagccattccagatcagcatattctcaaggtctggtgtctggtacagcagactcaatcccccccccttcctgatggctgaccttgggggcggagaccttgggacggagtgtttctcttcgggcggggcgggggctcaggggcagagctccaggccggctcccttggtgttcgttctcgtgccggcccacccggtgctcgttctcgggctggcccacctggtgctcattctcgtgccggcccacctggtgctcgttgctcggccccagcctacctggtgctcgttctcgggcctgcccatctggtgctcgttgctcggccccagccccgaggctcggtgccaggcggggcgggccgggggcgcgagccctgccagggtgaaggcttgggaggccccggcagcttcggggcagggggctcaggggcatttcgagcgggtctttcattcccccatttctcttgtaactgaatggaatcttccattcagaggtctctggttaggtctttctctaagcttggccatgctgcctctatccctgtatggtctgtataggactacctcagagaatgatgttaaggatttctcgagtgcattgactgactcttttaggacctggatatctgtgtgcatggcttgttgtagaagcttaaaatgattaattccctatgccggctgctatgccccccactgttatccctcctaataatagggccacggtaaaggatattggctccctcttatatcgggttgatttccctaacacgctgtaaaggaaataaggagaggcatagaggtggtaccggtggagcccttttgccatcctctggttacctgaatcttgtcccatgaggatgaaggcttccagtgagcatgccctgtcgtttcgcatccccatgcaagggagttccttttgacttagcattctaaccagggaaaatggacggcgaaatttctttccaaactgcttcctgctgactttgggacgaagttagggaccccagaaggttgaaatgctagtcaaaagcaaaaaggaatttgggcaatggggaatccatcaggggcttctggttagcagacactgttgcagagatagggggtgtccacatcagcagactggttcatatccatagcaagtccagggctcgcagtctatttagaacagcctgtagtccgcaactgatattcagatgtctgtcagaagcagaaacctgtttaagacatatttaaactgggaacagaggttaaaacttatttattgaagcccacagtgcagaaaaagcagatatctggatatctgttcaaacagcaagaacatatttataactttgagtcctagcaagaactatagatttgggctataagcatgtacatttctcttctgtccagagagccaggtatggattggacagaggtgcctttggcctgatgaaaagccctttaagtttgtacttagatgacaaccaaaataaacttaaaaaccttgagcttgtgcctgaacagtagatagtcattattttatcagctaacatactgactagtctatagtggatctgactgtctgatgctgtcaagctgacaaccagtaatatttcagagatctgagaagggtatattttatccgaatctactaaaaagtgacagaagccagttagaagcaggtccatatacagttagccaaacccaagtttctccattaccgttggaggcagctgtctcaaagaacaacaatcttcgccaggcctatactgtgagaggttttattttctctctgtggaagagggacatggaaaagactgaccttgttttgtctaggcaaaggggtacaatcaattttccagcgtccagcagttttgtccacggtctcggccaggttctggcaggcggcaggttttatatctgagcatctcgctcactggtccaggtgcgggaactgaggtgcctcgtaatcttttggagattttgggtcattgtcaggatctggcagtctgtctgacattaaaaactttaaagataacaatttaaatgccatattctgaagatctctgaagcattagaggtctgtttgtctgttttaattacttgccttaagcatacattaagtatctacaggtggctaggtaaggtcttatttctgtaaataattagcacctgctctagagaggtacaggtgatgcaaggccagggcaggcacatctaagtgccaggattccttaaacagtagcttaacttctttcttaggcagggtttttctgtgacttgtaacaaccttttctctgacctttgacaactttcctctgaccttctataacttttttctgaccttttacaactttcctctgaccttctgcaacttgctttaaccctctgtaactttctgtgacctccaacaacttgctttaaccctctgtaactttctgtgacctccaacaacttgctttaaccctctgtaacttttaccgcttgctttaattctctataaccttttataacaatcttttctgctatgacttgctttaatcctctataacctcctagttcatttctctgactctcttagacatttttagacaagttctcttttttttttccttccctttttattatttatgtctcctacaattttttttctcatttctcagttaacatcaaaatttcattaaagtcctttttacagttcttaataactttaaggccgtttagatgtccggatcaggccagataagtttatacgctcgagctgaggaacaaagagtaattcatttgcgtttatgcacatcaattacaaaacaaaggccaaacaacacagaacacagaacaggttttcgcagcgcggtttcgacagagagtcgaaagaattgagaagggggtggggtcgaagaagggggccctccttcttcgcccccagtaaagattgcaaatccctcaagccgagggccttctccaaagagactgggaagatgtccagtcatagatctaagttcaaaatacaaatccctcaccccgagggcttcccaagttcaaaatacaaatccctcatcccgagggcttcccaagttcaaaatacaaatccctcatacagagggctttaaacgctaccaggacgtctcctggagccgcggtcgggagttcggacccgtcagtccctcctcggatccgcctacaaatgtacacagctgtatactacaaacgcaagcgcaattcacaagacagactcagaccagacaagacaaaacagcggatccgcacaacacttacctcccagacgtgggtcggtggtccctgagtggggggtctctaatcccggacgagcccccaaatgaaagaccccgaagggatactttcgtagagggagacccacacacccaggaatcagcgaggccacgaactggatgtaaaaaacaagaggctttattggagacgcaggtacctggggcgacttagcttctgtgtggctaagcgcctcgagccaagggaaaaggggtccttatataggaaaaaggcgcaagctaggagcagggattctattggataattctaatgaggcattatacagagctattcccattggtcaatgtatatgaggcgctatacagggttattcaaatgaggcaaagtacagagttattcaaatgaggtgaaacacagagtctttcaaatgaggcgaaatacagaattatttccattggatggttcaaatgagacacagagccattccagatcagcatattctcaaggtctggtgtctggtacagcagactcaaatccccccccccttcctgatggctgaccttgggggcggagaccttgggacggagtgtttctcttcgggcggggcgggggctcaggggcagagctccaggccggctcccttggtgttcgttctcgtgccggcccacccggtgctcgttctcgggctggcccacctggtgctcattctcgtgccggcccacctggtgctcgttgctcggccccagcctacctggtgctcgttctcgggcctgcccatctggtgctcgttgctcggccccagccccgaggctcggtgccaggcggggcgggccgggggcgcgagccctgccagggtgaaggcttgggaggccccggcagcttcggggcagggggctcaggggcatttcgagcgggtctttcaccagcacctatttggtggctcacaatcggctgtatccctggttccaggggaatcttatgccctcttgtggcctctgcagacagtgcacacatgcatacatggaggccaaacagtcacactttataaaataaaaacgaataaatcttaaattttcttttcttaaaagaaagatggatctgtgatgatgatatgcttcagaacacaatgtctgggagacaaagcctaaaaagcaatactcttaatctgcactttttttttttttatgtgaaaggtcttacaaaactctgaaactgaaaccacactgaaccaccctgttaggtctggcttgtgttgtgtgtgatgagtgtttttaacatagctgcatgttatccatgtgtgcctggtcacgatcctggtcttccacaaaggccgagaacgagggagtgatgggagtcaggcaggacatgaggaagcctttgaagttggaattgaaactagccagaacgaaaatcgagacagaaggaaggcctgggccctggatatggctctgtaagaaggggaagaatttcccctacccatcagctctgttgaacttcagtttgtgccttgggacaagctctggtctcctgtttttctggatggttcttcccttccttggtcttctcacttaaccaaacacttgggccctcatgcgaaaggcctctgttaaaggcgcagactccgtgcacactgttcaaccaagcatgcttcatatctttttaatcctattgtatagtccaaaggctaaagtcattacaaagctttattattcccacagcgagaacaagtctcatccttgaacttgaagacagaaaggaaaaccaggtgagatgacggctaggcctctgtaagtgcctcattatctcagctgaggaaatggatgtctttttgataattcaccactgttctccagcatgagctctgggtttcatatttattaacacttttagagttgaccttcaagctggctgacagatttccatagtaatgtttaacaataagaaataaatcgctatagctgtcaacagtgggctgtagattgttcgtgctctcatgtccttcagtgtatttattactctccactaacataaaaaactaaagaaagattagtgccacattagcttgcaaactacgttagagaaagtataatgtattcgatattggagttagagaaaatgagcagggagctaacggtgagcaactggttctctaaaataacttttaacgaaaaagcctatgattctgtatttgacgtttatagatcttggaaaatgtggagcagcatttaccattaaaggttctatactaattgccttggttaatttttaaaatatttgtttattatttgttctatttatgttatgtgcacttgcttgtatgagttattgtgcatcggtggaaaacagaaacccatgcagaccagatcccctggcaatggagttgtgggcatttgtgagaaggtcatgtaggggctgggaacagagcctgggtcccctatgtaaacttgcctaatttcactttctttctgaaatgactggcttctctcattttctgttctttacgcatagtccagcttttcagagatgtacacagttgagcttcgtgtgcctagggttcatatagctttgaagcatattttaggatttttcagaaaatttatagaaaaatgaagatgcaaaatcatttttaaaaccatcaaaatgttaccgatgtatttggagcagaggacgtagtttttgagcagtgaaaaagataagggtatttcagtagatattattttatgtcatcattcataaatttcagtctttccctgaccataatacttcattggtgaatatgttcacattgaaacataagaaaaaaatccaagatgaatttgcatacctatgatggggaatgtactatgtatgtttatcttattgattgttgaataaaatactgttaggccaatggcaagcaaggactaggagtcaaagaggattctgggaaatgtagtagagaaatgatgatccaggcaggaagtgacatggcaaggagactcatatctaagcgaggaaacaggaagtatgtctcttttcccgtccgctcctgctccagcggcacaatgtgatccaccggcaaggagggacgccagtaaggcatccgataagataagtcttataaaatatataagtttatgatagttaagactgagctaacagatgagaatcctagtcattggccaagcagctttgaacctaatacaagtttctgtgtattcatttgggcctaacttgggcgggtgactggtgtagagctcacacatggcaatggggctcaggtggcttttggcagaaagatttatcgtcacatacctattacagtgggcaactgtattaaattaaaataaagggggctggtgagatggttcagggggttagaacacctactgcctagcctccttgacaacctgagttccacccctgggacctccatagtagaagaagagaactgagttctcaggttgtcatctgacctccaaacatgtgccaggcatatgcatggcctgtcacacgcacgcatgcctatacacacaacaaataaatagaaaaaaaaagacttaaaataatgagttaaaatgcttgctaaaagcccaagcaggacctggagagatagctcagtagttaagagcactggttgcttttccagaagacctgggttctattcccagcacccccatgattgctcataattgtctgacactccagttccagggtatctgacaccctcttctagtctttgtctgcctgcacacatgtggttcatagacatgtgtacagacaaaaacacccatacacataaaataaataaaaattgtgaatgcctaagcaaagtcctctggatatttttgccaaaaggaggcagagggctgagaaaagtatcagaatgattttttccaaaatgcaaaaagggagttatgagagtgagagattgcagcagtctcatgaaatctaaaagtagctggagttattatacacttccagtgtgtactttgactaaaatcttcagctttctttatctctcataataatgagagaattctttatataatacattattatgttagaaataatgtatatgaaattgctttttaaaaaaaagaaagaaaaagaaaagaagaacgatgtgtgtctaaacagaactttcctggttgtaaaattttgaagaacttggaacacatcaccaagacgaagacaacagaagaattctttccctggatgctttttacagcagaacaaagagccagctggagccttctggagaagagggtacttgtctgctcacttctgagatgcctgctcattttgttgtgacacacaattgcctgagcttgcagggttaatcctggcaccccacaagatgagtgcatttggactttttatttccctttcctgtagcaaggcaaaacccaatctgggtttagtcccgtagactttttctccttagttctttgctgcctagcccgagatgagtaacagtatctcactggaggaagctgtattattacaatgcctcactagaggaagctgtgttacatactgttcccagggcagaagaatctcgggcccatgttgttggcaatctttgatcggtgtccccactttttcttctttagactgtaacatcaggatggatgcagaatctctgtaaactcaccatggtgatgctcaggtgtagaacccataaactcatgggctccttgacatggatctgttgaagcctagtggtattactttgcctttctcagtgctgtgacaaaatgcccaaaacagcaacttcagggcagggctcatcactcttccaactttgaggatgtgtaaggtgggacggcacagtggcaggaatgaagaatggagctcagctacctttctctctattctttccaggaccacagcccgtgagtggtgccaccacatttagggcaggtcttcctgccaaaggttgtctcctgtgtgagttgagatcctgtcaagccgagggtcagtattgatcaccacatctctccttagagacaggactcgtgtgtaggctctcactaagtccatcaccatgaggcaattctttactgccatttcagagaggaaatcaaggaataatgagccatgtgactatgagcttggtcagttaccgtggagcataaataccatggccaaaggcaacttggggctgagagggtttatttcacacacagttccataagatagttcgtcatcaaaagcaaataaatggcaggaattcaagtaggacaggaacctggaggcaggagctgatgcagaggccatggggagtgctgcttactggcttgctcctcatggcttgctcagcctgctttcttacagaaccctgggacagcacacaccatgggctaggtcctcccccatcaattactaattaagaaaatgctctacaggtatgactacagttcaatctgatggaggcattttctcaactgaggttccttctctctaatgaccctagcttgtgtcaagttggcataaaaatagccagcacaatcacctgtgtaaacaaccaagctagcagaaatgtgggtcggggagcacgaaaaaccaagagtcctttgtcagagtcttacattgctgtggaatgagagtggggtccatgggaagcaggagcgtgtaagcatcacaccagttacagatgaaacactgctaagagctgcaacacagccaccattgctcttcttcaatgacaacagttcccttggaactgatctcctatcatccggccaaaggttgatagcaacaatgtgaccaagaaaacttcggtaagagctctcttaaactctgccctctttttgcaaccaggtttgagccacggtagtctttggaccattgtgcacagtctgagaagacagtctgtgcatctcagatggcttttgagtaagtcagggtttctgatggaattttttgtacctgaaattaagctgtgattgacacctgtcctgtcctaggccagtcatcaggatggtgagccctttaatttcttgttcttatctagtttgattcgattttcttctgttatgtttgactgaaagagatctaacaagacatcaagtctgacaaagatggaagacagattctggcttgatgagcagtagcgtttcccacacatccaacaaatccgacaagagtgctaatcacttgtattatttcaggcagattgtctaaaccaaaattccagatttagaactcatttactgtgtgattggagataagtcacttaacatctctgtgccttaaattctttttacaaaaaaaaaaatgctaacagtgattgtttctaccttataaatctgttgttgggattatacagaacagtatcatgttggtcagactgagataatctaattttgtgtggctgtggggacaggagaaataaaaataaggtgtttccctggaaaaagaagtgagtttcttcctttgaaatatcaaacaatggaacacagaaaacaaatcaggaagaaaaacaagtccaagactgagaggtggcaaggagccgaagagggatgtagaatgagttccatcctccagatccattggatggtgagaggaacagaacaaaggttctgggaagaaaccattaaggcagcattgactggttcataagtcagtgtcttacatcccaaagaggaggctgcgttcgtgagtgtggtcttgtgggagcacatgacggtacagcttaagtagcctgacatcacaggtgtgtaaaggacaaaggggtaaaggcgggctggaagcagagagggaagcgagggagccttccttagctcagggagaacaagcccctggctcacatggagggaccgcaccctcctcatggaaaagctcccgggcggggcgcgctttccattgcctggtgttttccccagtcctccaggttggaggagaggaggagtcttgtatgcaaatgtccatctcagggcagtaagcctaaaactatgcaccccatgattgattctaaatcttatcttgtgctcagtgatgaaagacgggaaaattatgtatgcctcactgctgtagacagatacatggacatcaataagatttataatggaaccaaaacatccgagggacaaacgagcagaaaatattcaagatatattctgactctattagaacgttaacacaaacctctcaagctgcttaaatattctaaaccatgcacacaaagatgtctgctatggtaatcgtttgtattgacagaaacagggaagtcatcttagctgtccatcgataatggaatggttaaattacttggggcatacaaagtatattttaaagctgtttaaacatccactaagagtgagtttttaaaagcctgtggtgggtgaggcagaacccagggtcttgagtgggctgtgcatgtttctagcactgagctatatcatcagccctgaatgccaagtgctactgacctggtggtgtgcgcccagaaccctcagaggccagcctggtttctatagtaaaactatcccaataaaggaaggaaggaaagggggagaaggagagacaatgctataaaataccaaaatatcctactatgtagcatatgaaaaaagtaagccatgtgactattttatggaaagacattgaaagtacagcacctttaaattgaaaaaacctacagatcatctatgtaataggtgggttgggtttgtgtgtgtgtttcttttgagacagggtcttgtgtagaccaggctggtctcaaataggtagtcaagcatggccttagactactatcatttgtctctacattccaagtgctaggattatgggtgtgtacaaccttacccagaattccttttgttttttttaactaactttgagggttggggtcatagctggatcagtaaagggcttgcccagaatgcagaagtcctgggctctatatccagctacataaaccaagtgtggaagtcttagaatacagtgtatgcatgtatgaaatatatatatatcaactcttatggtctttttttttctgctatcgtccttttgatttgcacttgaactgtttattagatatggcagcagtgtttagaattctttcagcaaggattatggaccgaatcagtactggtaaggttctgtatcatgccagttcagcactagagcactaagtgagtgtggtgatgctttattaacaacaatgtggctggagagattggctgcgtggttgtgagcacttgctgcctttgggtctgagcaccagccagggggaccacaaccacctctaactccagatgcaggggctccgatgccctcttctgttttccgtagagattgcatgcacatggtacatataaacatgcagggagaacactcatccacatctctaaaaataatctcttcacggtgtcactgttaagtatttaaaatggtgtgtgacaggtgaagcaaggtgtatgggaatcttataagccagatgaaaagtttgacatttgctttattctccctgactcagataaacttgtcaccaacactcacatctgaagaaccatgcaaggtaaactttgttccaagcagccaaaagaagttccctcagtattcttagtcagaaggtaaagtgacagcatagtccacagaacagataggaacttgtggttagtttttgccagcttgacacaagctaggcttgtctgaaaagaaggaacttcaggtaaggtttggcctctatcagactggcctgtgggaatctctttggacattttcttgggaaatgattgatgtgtgagattcgagccctctgtgggaggtccaggattgtataagaagacagattaagcaagctatgaggaacaagccagcaagcccctccctccacggccttgcttcagttcctgcccccaggttcctgcccccaggttcctgcctccaggttcctgcccccaggttcctgcctcagtcccctgctgacttcatttcatgatggagttagctgtcaactgcaacaaaccctgtgttccccaagttgctttttatcgtgcttttatcacaccagtaggaagcaaagcagggcatagacttcaataatgaatttctttgtttacaggtattgagtctccacaatcctttatgtccctacagctcggattggcagcaagaatgaacttccttccttaagatcaggaacgagacctccacttatttttaggaaagaggttttcctggaaataagaattagagccaacgttagtaaaagcaggcttccagcacactgctgcgatacatagggtatttgcctcgttcctcagtcccccactccatgcgtgggcgccaccctgccatggagcagaggaccttgaccaaatactgagtgggaaatggttaataactggacttttttttacatactatcagtcctttattcggacaaaggagttgtcgttgataatgtggagactgttggaggggagtacagtaaacatttgtcctttttgtttcttttaaatatagaaccgtttcctgtgctttgagaaattcccatagaaagaaactgtatttttcctaaatcagtaaagtaagaagacaataatgttgccagagtaaccaaagaaaaggaagaaaaaagatgaccagttacatcccactttatacaagtaggataatatttagtgtctaagtcagatacagatgtgttaaataagtctgtcccacatcacttcaaaattcatttctcctgggtttccttctgtagccttgaaaagcaaactatctgctctccagtctcctgtaaggacaggaggcgggtagggtgggcatgtgacccggggtggccagtcagatgcacaggtccagacttagtctgctctccagtctcctgtgaggacaggaggcgggtagggtgggcatgtgacctggatggccagtcagatgcacgggtccagacttagatcggatgaaatcagataaagcaagaacagtaacaacagcatcagcatctggtctccatggaaacagtggaactgcaatgaaagctttgtcattctgtgtccagtcacacagcagtgtaggcagtaactactctatggatttgggggctcactggctggctggcctcttcatcctgaacttccaagttcactcactggaaggccatcttctgcctgggtcagcatctccatttagcacgttctctttctgcttacattgtacaaagtcacttttattttcctgttttccctattgaaaccttgtttacaggtgaccagagatttaggaagagaaaagaaaataatatggacatttaaatataatcacattctccactctgagcagctccatgttaggagggagcagggagtggtgctctgagcttatggcccagctgtgccactcactgctgagtgaccagtttatttctatgagatgagcatagtctcagtgtcactcccagaacactgctctgaatctcaaatgagtcaatactaagaacagggcgtggtacagataaaaaagcatatgcatgtttaaaaacaaacaaacaaaaaaacatgacttacaagttgtgttcagaggcaaagccagtcatccgtgatatcgctgcattgattcctcctccaggtgccaggaaagggtcttggaggaatcttcaatgtgaaatccgtcatcctgtggctgacagaggctagaacaagttaattacctttagtgctcatattcatgcatcatgccctgcagaatctattaagctggtgaactttgttagtgtaattttgaaatgaaataggggatgttcagaaagtctatgtatcctaaaacagctccccccactccagttaatcaaggtcccacagagtcatttattagcagacaatgtagaaaaggtgctcatggggtgaccagatggcttgaatgctattatcagagtaataaagggaatcagtttggctttgttgagacagtgttacatgcaggcttttggggttgttgagactgtcacatgcaggcttttggttttcttttgagacagatagctagaaagatgataggtagataaatagataaatagatagatgatagatagatagatagataatagatagatagatacatagatagatgatagagagatgatagatagatagatagatagatggtagatagatagatggtagacaaataaatgataggtagatatgaacatatatagatgataggcacatagctagaaaggcgataggtagatagatatgtgtaggtattatatacaggtaggtgggtatacagatgtgcagatatacagatgtgcaaatatacagatatacagatgtgcagatatacagatgtgcaaatatacagacgtacagatgtgcagatatacagatgtgcagatgtacagatgtgcaaatatacagatgtgcagatatacagatgtgcagatgtacagatgtgcagatatacagatgtgcagatgtacagatgtgcaaatatacagatgtgcagatatacagatgtgcagatgtacagatgtgcaaatatacagatgtacagatgtgcagatatacaggtgtgcagatgtgcagatgtgcagatatacagatgtgcagatgtacagatgtgcagatatacagatgtgcagatgtgcagatgcaggcttagatgtcacgctgtcacctttctctagagagtttcattcatctttagatcctttagttcatctgtggtgtttgacattagacttgcttataccaaagaggaagtaaagccgtcagcttactttgtggtttttaacagtcactgtggcagctgctcctatgtcactgagtaaaataccagacagacagacagacagatgttggggaggaagggtcagttttggcccctggattcaaacagctcgatctatgttgacaaggaaggcaataaaatgaaatgaaatgtgtcctcatggtgagaattttcttacaatttgtgtcctctcattcagaaggctctgcagactaacatctaaggcttcttagaagttgacatttatgcctcttacccaaggagataaaatagattaaagagttttttttaaaaaaaaaattcatgtatctgtttttactgtccaatcaatcttgacagctgaggagattttctcagctcccatccaagcctgggtttctagtttccaagttacagggtcacgatccaccaccctggggggtggtgatgcagtctccatagttatttctctatcacatcacacctagtaagtaaatgtatataaaaccataatgagggtggatgctgtacacttctcacccagcaagacccccaaatcattctcctgtctctgtttggttgttagatatgtaaggagaagccagggagcaatttctggggcagacaaatccctttgtcaatggtgaataaagcttcctgggctcactctcatgtgcagagtagaatttttagtaaaaagtcattgactgagacctcacagcctccaaagctgatggctatgtgctcctgaactgctacgtgtgatttcagctgctgtgacggatgctcagccccatcagggcagttcttgaatcctctctcaccttggtacccgttgccagaacaaatgtaaccctcaaaaggaggagtgttttagaatgcagaggcgtctgctcttggggtgttatgcggtaaccaccaacacgttctctgccgcatgatgttctgccaagctgcgtgggcacgcttgctcaccaaaagatgaccggtcctctctgtctgtcttcatgggatttgaaatcttgttggagataatgattaagcaaaccattgtcccaggttgacttttaaattttgactattaatacatgatttaagatactaaatgtatttctctataccactttctcccacaaaatagtaatgatgactttttttttccaccatagggatagtatgtattgtgacagtctgatctatttagtattaagcaagaagtccagagtggatgcttgggattatttaagggggtgagagactagaagaaacctctcttttttcttttctttttttttaaaaaaatctttgacgatccagaggaagagagatggagtttgttgccagcacctgctcccttttcctctaagcttacaagaagtaatctctctgagtcacagtgagcgactcagatccaaattcctcccattgtttgttcatctccaaagtccaggctatgtgtaatttctctctcaccaaccaatgcctctgcctgagtaatcctcggggcagcctgaaagaaagaactctatattcaatctacaaaaatgactaaaagcaaggtttcttaatcttctagagcactggttcttaacctgagggtcatgacccctttgggaatcacataaaagatataccatatattgaatatttaaattataattcggaatgtagcaaaattacaggtatgaagcagcaatgaaaataattttatggttgggggtattcaaaagtcacagcattagaaaggttgaggaccactgtaaatctagagggttcgtgatctttcaaagatattttgtttgacagataaacactgcatagattgaggtggtgacaatgttttgctggatgcttaggtcaggcaatggatgtgtgcattgtctaatgtgcttatggtatgtgggggttatgaagatttaaaatctattttcttggcagttttcaagtacacagtgtattgccattacccatttatgtctaacctgtaaagattagtacacaacccctagaggctaggataagccccaggatgtgaatggagaaaggtcgggaagtaggtggaaaaacacccatgacagggacagttccgatgttctgtagcccaggatgataactgtagttgcaacaactcaccgcacacttcaaaacagccagggaaggcactgaaggttccagcatgaggaagctttcacaggttagtgcgagtatcaatgccatgttcctcaaactaacttactttacttaacacccacccacattgccataaatgacaggatttcttccttacccacagttaagcagcatccctttgtgtaaaattattctcttcttatccgttccttttctacaggctgttgtacttgactctgtctcgcagaagtggggacgataaacctgaagaagcaagcagctctttgcaatgctgagcctctctggtttgtgtctgtacccagtcatggggtaactgggtcgtgtggtggctgtattgtcagaggtttggggaacccaacactgttctctacagggctgaactcatttctgcttctacaaattccccactcttctgttttcttgcccacatttgttattttttgacttgtttataacagccattctggctaggataggtctcccctctccccacccctcccctagctttcagttgtatctctttaataattagtaatttgaacatttttttaactttgtgtctgaattatttattttgtttctagctgactttaactgttacataaaaacatggagcttggacacattaatctggagccatgtgatgttacaatactgtataagtcatgcaatgcttaaacatgactatcccctcaatcactgaccacgctacagcagggtcttgcacagacttcccttccagcttttccttttaaaacgcacagtacgttactgttgccatagtcacttcactgtgccacaccacacctgaccggcttgctaacatcctgtcatatacctgttgggcattttatatattcttttacaaaatatatctacttaagtcatttgcctattttcaaccagactgcttgggcactttgctagtagcctaatcacttggtatttttcttcccttctttacttcagtgacttccttctgaggaatatttctactgcagccctcgagcattgattggcgcatggtgtctccattgttgaatctcttgacacatttggttaagagatttcttgaccaaatttcttcctgatccgttggctatgttgccatgtttctgagtccttgtcccatcctactgtagtggggagcacctgctatgaatacagtcttattaactaactgatgtgttctggagaacctcccaggtacacttgggaggaatacatgctttccctgtggggagtagtaccctgtgtgtacacttcacattatttttatttgaggtatagtttaaacaaagtttccttacagactttctgttggatgatgtgtccattgttaatggtagggttcagaagctctctgctattgtgatatgctacactctattcagatctaccaacacagtttgaaaatgtatgtgtcccaatgctgggcacatatatgattacagttattatatctctccagtgaaggcaaccttagtcatcatacaatgatgttttatgtctctttttatacttttcatgtaacatctatttttactgaatacaggtatggtagctacagatatgttcttttggattccattttcattaactatctttttccatcctctcagtgtgaatctatgtgtgccacgcttacttttttttttaaatgatagcgctttactgggtagctggaatatactaatacatgtgaaacatttctattgtcaacgcttgaaaatagatagccgctctgtaaatgttaactgtgctattgctactgtaagtttagcccctaacaaaattaagacagagatggaagaaaagataattgggacagaagcaaactgacaggataggtattgaaaagtgacatcaactcctagcaacgaggaaggcacaactttaaccccagcccctgagagacagatgcaggtggcttcgggagggagttcaggaccatcctctccatagtcagccagaccagccagcctggtcccaaagaaaccaaacaacttttaagggagtgaagaacaaagaaaatgtactaaggatgtgaacaacttcttcttcttctccttcttcttctccttcttcttcttcttcttcttcttcttcttcttcttcttcttcttcttcttcttcttcttcttcttcttcttgtttatcgagacagggtttctctaggatgtaaacttctttaacaaagttcattcattgatgaatgtattcattcactaggaaattataagccaggtgctatgtgaatgttgaagatacaagaatgagccctggtcttatgggtttcatcatcaattaggaaaatacaaggaaacataaatgtaaattttaaagtctaatgggcatatgcagggagtgtctggttatttatgagtttgggggaatgtattgagagacgttgtgggaaagaaaataaacaattatcagagagacaaaaagaatacttctttttacccagagtgtgacaaaaagtcttcagctaagcagctgtcctcattggtgggcctgactcgacagaaatgtaagtaagactcctgtgtgaaccttgagtactcagaaagcagctgcacaccgtgggagaaggtgatctgctgtggttgggctgagagggagagaggaaaaaggagtgtccttggggatcataagctaatggcaaatgctcgcagggatctgatattgagactacagccttaaatcctacaaaccaaaagtgttgcctatagtggatttgttctggccatgtcaactagcttaggtcttacaagtgcccatatatcaactcaccattcacaaattctctaagacctgagttacaatcactgtgagctagatcctgtggaaatttaaatcacagaaacattgtaaaactcagttactagaatagccagagacagactataaaggaagcatatttaatgttcctaaattaaaaactatttcatgtatgatgaaggcatataagcagctatcaaaaccaaccaagaaaaagccaagagagagcatatctataaataaacaacatgacagataattgcacatgttcgggacaggtgactttttctctacaaaggttcagttcttaattgctagcatgaggatagcttcccatttggacagtccacaataatatctcctctaattatatcttactctcatccctcactttaggtgaactcaaatgtatgaaaagaaaagcttaagcctggcattggtggcgcatgcctttagtcccagtacttgggaggcagaggcaggtggatctctgtgagttcaagaccagcctgtacaagagctagttccaggacagcctccaaagccagagaaaccctgtctcaaaaaatcaaaaacaaaaaacaaaaaaaggaaaaggaaaacaaaagctttaaactaagataatagcatgagtagaatatactgtttccccaatatactgaagtatttattacatcatcaagttcaccagcacccacctgtccatgagtctgtgcccctccttgctttatggagttggcctgctggtgcacttggagttctttgaggggacacagaattaaatgagcgtaaatcattgacttgtcccactgacaagaatgttgacctttgacacctgtttcccttttgtcacagtggcctacttagaagtcaaagtttcatgaaacccttcttggaactccaatattattgaaaaattcatgaactggcatattgcataagtccagcaggaaaatgttagcagtgctttctatttattcccccatctgtctgcatgactcataattcccctctgcccccttcactggcgaaatctataccaagtgtgtcaattacataaacccttctctgcctagtcattttaaagttagagccatagacacttctgtaagaaaccccctgtcaattaaccagcccatgagaattcctcagtactcatggaccaaggggtcctagtggtaattctacctgctaaggacgcccaaagacagcctaataccacatctatggacctgtgctgccacctactggctggaggataagggtgccaaagctggggggggggggcacattctagagtactcctgacaatcctcccaaaagttatttagacaccaatagtacagaaagttgctgtgctaagtaaggaatgaagcactaatgtagggtggatctaggaatggggtttcactcagaggcaagtgggagactctaaaagctgcacttgaacctgacagccaggtcagacattggggagtaaaaaaatgctacttatagtaagctttgttttgcatttgtaacatattcaagaaggtgtacagggccagaactgtgctccttggttcaagtcagagtcctctcttggcgatattgaagaagttatttttcactgcacaagtttcttcacttttccagtgagtgagaataacgacagacagtgcatgcacatccatatcgcagggtggcgctgtgtggattaaggcagttaatatgtactgaacacttagaatggtaccaaccatggttgaaccaccctgttagctaacctcacttctatcctgctttcttctaaccactaacttcaaatcctaccatgcagaaccagttcctcagtatcttactattctgatgctatgaagagacaccatgaccaagccagtgcttataaaagaaagcatttaactgggggcttgggtacagatccagaggttagcccactgtcacatggcaagtggccatggtgctagagaagtagctgggagttctacctcctgatccacaggcagagaaagagacactgggcctggcatgagcttttaaacactcaaaacctacccccagtgacatagttcctccaacaaggccacacctcctaatccttctaatcctgtcaaagagttccaccacctggtgactaagcattcaactacaggagcccatgaaggccattcttattcagaccacctcacctagtgccaaaagttgtcagaaagaaaagagagcatttggtaagtgaaatgaattagatgcaagaaatgtcgagtgtggagcagcttgaaacaccttcctctcggtttccttatgtgatggttttaaggtgcctgtttgaatctgagcacccccagcattagcacctaataaacgttaccgcacaaaccactgtaaggcagctacaactgtgagttagcgctgtgctctgtgcctcgaatgtcgtagctcttgttcctaatactgggcgggggagcctgaatctgtccgtcaatagactactcaaggccatttgaggacgggctttaagttctgagtggcagcaagaacttccccttggtgtttcctgacaagaccagaaaagtctccctgccctggaatagccactctgctcagaagggtgctaagcattccaagtcttgatgagaaagaattgaaaattgcacagtctccatgactgggggcaaataaataaataagataaaaatccaccctatgcagttatttgctttacctatgaccttgagtgatacatgatataagtagtgtaaataaaccaactagagccccttcatatatatatatatatatatatcaatttgtaaagcattcatttgcagataatcttctctgtacgtcatcaaacatggccatatctcttagataacggcacactggtgagatcagaaattctgatcacagtcaccctcaataaccaggattaatagagttcaccaaatctgatgggcaaagccagatacacagaaaatctgctcccggtgctcatccatgctaagttactgaaaatatcaatgactgttttgcatacttccattaataatgtgtgtctctggagcagggctttgagaacttggaggcctcatcccacttgcaatttgcactcttgatgctttaagttttcagttgaagatgtgagcactcctgctacctggctgccacgctgtccctgctgtccaggactctacccctctggaaacatgaaccaaaataagctcttctgtgagtggcggtgaccaaggtgttttatctctgcaacagggaaggcattaatacagcagtggagctccctgccatctcagaagttgcaaatttcaaccaaacacacaaacatgttgtatcatattagctggtgatgactgccagggagaaaatagagaaggaagctaagcagagacagggtagtgtgtgcttgcaatttgctcactgaccaagatcatttgaacccagacctgagagagcagaaggactaaccacacatgtcaggaggagggacgttgcaggcagagaggaaggtgcacacacacaggttctgatgtcagaaaggacttgcaggtttttggattgtgtggacggtgcatcacttatcaggggcaacacagtaggaagtgaattaaagatgcagctcagggttcagcccatagctcagctgtggagtatttgcctaacaagcacaaggcagctgggtccgatgagcagcagtgagcaatatctttgagtgaatcttctctgtgatttgtctcaccattctgtattgatttcttgtcttaataaaatgacttccattgctgggtgacattatccacccttcgagagtttttgtaagaaatcagactatttcaaaaaggaattaaaatgatacctagtgcacagcaaattctaaataagtagttttagtattttgaatgtgtatttagattcttgaccatgcctacacaatcaacaggtctgtttagcccacttgttcagggaacgcttctcatttggatttgcattttggtcacttgcacctgtggccactctcacacagtgtgtgtattccttgagatttcttgcaaacatgtcactttaaacctaacacttcccaacctgtctgaagagagagggagggactcggtaaccgctgggagtgtgagcaactggcctcccggctttcttcagttggctcaggttgtcctccaccaccctttcacaatctcgacaggaaagatgatccatgacgggtgcttccatgtcctctaccccacctaggtgtctctggttagctttcccaggaagtctgcctctgagatacgtcatctaacaagcccaactgtcttccagaatggctcagacattctcagtgaccttgcctacttttctttcgatttattttatttttgactacatggatgtgtgtgtgtgtgtggggggtacatctctctctgtgtgtgtgtgtgtgtgtgtgtgtgtgtgtgtgtgtgtgtgtgtgtgtgcatctgtgtgtgtttctgtgcacatgaaggaagatgcctgtagagaccagaagaaggcatgagatcccctgcaaatatacttgtgagccaaccaaatttagacgctgggaaccaaactctggtcttctgcaagaaaagcagcactcttaaccactgagccatctctctagccccatagactgtttgtcttgcatggaactcattatgactggagggagtgtgatggaattgaactgctgtgaacatctcactgataaagactttcaggaacatcacaacttaatagatcccatcattagtatattaagtccttggtaaatattgtgtgccgagtctaccttgtcaactcgtgtttcctttgaaatctggaatagaacagtatatcttgggaaaccaagccagctatttgacgtgcctgatatggcggagaatgatggaagcttccctagttgatgcttctgctcccaagtctctttgctcagacatgtgcatcctcacattcctccgggagcagagccaagggctgcagagttttctgaatccagtgttaacattgcccaagggataaccctcctggaatctactgagtacaattatattcatgtttctgcaactgtaaatgactgagatgctgtgtaagaaaacacagtgaactcctctggcgtaacatgggccctgcccttaacaattcacaatttaccgagaaaagtttgaaatgaaaactcctaagtgaggaaagagcaccacagtgtggttctaatatgtaagagcacataaatgttcattcaatgtcacagtaaccaactatatcctctctcttggctagagagtaggcaatctctttaatcctttcaaaaatacaacttttggtttggttagttctataagttctattttttgtttctatttcatttatttctgctctggtctttatcacttcttgttttccactgggtttgagtttgacttcttggtttttttgtttgtttgttttgtttttgttttttgtttttttagagctttggggttatttattttagatcattgctctgtttttacttacttgagatttctctaatattttagagtaggcagttatagatataaattgtcctcttagactgccttgactacgtctcagaggttctggcaggcagtgtcctcactcttacttggttctaggaatgtgtgagaggcctccctgatttcatcaatgccttgctctctggttcattcaaaagtgcattgttcaattccaaccacttgtgaatttgagtattgtggggcagttatccatgctagttttgttccactgtagtttgaaaggtaactcaggctcaggaacacaaaaaactacatattctgtctcatatgtgggtcctggtgtctattctagaaagaggggaggggagagggatgggtgtggaaactcgtgagatatgaaatgaagggggactctgggatcggaagggtacaagtgacacagagacaggagattaggagaggaacatgtggaaaccagatatgtgcaaaaataccgcagaaacatgccactctgtgggaactaaaaaatcaaatttaaaattttaaaggtggatagaaggcaatttttggaagaatgtttccatctagtggccaagttgagaaattcacagggtttaaaaatatgtctgtttaatagtttcctactaagttataattcctttttgtgctcagttaccaagtttccaaaaatgtattctcatgtttggccagattcccaaagaagcaattactgcagtgagaagcgagttgtgcatttgttaaacagttggttcatcttctctgagctgatgctaagactctgggccccacctgattccctacacatgcacctgtctgcacctggataatttagtaatgttatagaccctccaagactgagccaccagcacgaatggtcaaattctgacagtgtcttacagctccatccgataccctggttcaaatactgggtgctttccctcactctctctttcatggggctttgtctggtctttctctgaggggatcatttgtatttcagctgtttaccataatgttacatccgagagctcatggagctgtgtgtcctcatagctcactccttccaccccacgccctggttcttcctctgttgacatcatgcttcacgcctctgttctctccttggcagtggtatctgggtcccccccccccccctcattttttcagttttgctcttgtacacaatactgggcaagttcccatggatcatttcccagtcatgctttctggctggtcacgcatacaatctcgcaaaacacctccccattccctgtccttggtcattctatttcctgtgggtaccttctattcacccaaggcaggaacccatgagagacaaaggagatggtttatccaagtccaggttttgttgttgctgttgtttccttgcatataggagcatgaatgagagctacttacaggagcttgtgtgactctaaaacagacgtgagatgtgtccccaaagagttccacccaagcaccaccttccagaagctgcagaggtggataccgaattcagtcaacccatactcctccacactctagtgcctcttgagcctgcatgttgctgggagaggcacggaggaacttgtgtggctgcacaagtgtgtcaggaagatacagccctgccgagaacaccttatagttctgatttttgtcaagtctttgcatggcctgggtttcagaagcctgacaaagggcagcaagggagcaaagaaaacaccgatatagagaagttgtaatcaagcggtctgggctctctgttgggcaagctgcaccatcccgtttcttgtatacaaatggacaggggggcggggttattgactgcagctgaacatggaggcaacactactatctattcctgaagaaggaggcagagttattatacacaggtgaacaagggggcaggttcagctaatctaggtaggagcagccttgataggagagcagtcttcaggatgtaacgtctgtggtgagaaaactatggtggagattttctgcacacactgttgacactcacattcagacctggggaaggcttttcacacacacacacacacacacacacacacacacacacacagagagagagagagagagagagagacacacacacacacacacacagagacacactcgcgcacacacacagacacacacacagacacacacacacacacagacacacacagagacacacacagagacacgcgtgcgcgtgcgcacatactgaggcactggtctttgacatgaccacactcatgtcaacaatacacattcactcagggcttctgctcactccctacagttttaaaatcacactatgcaattgaaatatatttcccctagtttgcttttcgattgcccttgtcacaaagttgcaaattcacaggctcaagattttatctttatagtgtgactttgtccaacgtaacacctggtccaggcataaacataggagcatgaaacacagtgacaaacaaggagacagatgctcagggaagcacggttccccagaaggctgggatcactgggacgcagaagttttacagcagaggtgtttactcctcaagcactttacagacaaagaaaatgggtgtggcaatgtcatagtggtgggattcagttaagactccatccactgtcagggtgggaggaggagtggtaaaagggagggaaggcagggaagtctctgtaaagacgtggagatcacaggaaggtcagagtaagtcagtagacacagaaaggtctgaggaccaggaaaaaacagggatgaggaacaccagtagttttcataaggaattaggtagaaattttcattttgaagatgagcgatgccttaaaggaaggccagacctcagggaacttcagaagaaccctctagaaaaatgcttagagctgagtaattacagattataacaggggtctcagcgtgcaggattttgtttgtttaatctgtagcaattgtttttattctgagaattttctacgatgtgtgtgtttgcctcttctgccccaaccccccttataatcatgttcttcctccttcttttcccatcccacacaactctgagatttcttctccccaccccccaactccatccaggctagtttgtactgccccaggagtgaaacgagtcctactgtgtgcttgacccattagactcacaccattaaagaaaactagtcttctgatagtaagaacatcttatgtaacatcattggacctttgcctatccgccttccccacccctgctgggattttgtctggctggggcttgcaccggtcttgtgaatgctgtcacagtcacatatgttcagatgtcctggtgtatttggaaaacactgtgtctttgatgtcagccaccacagctgggtcttacaatatttctactccctctttctcaaagccccctgagctgtgatgtgattatgtatcccgtttggggctgagtactccgccgcaggccgcccagtgaccatctggggggtctctgtatgaattgtcatctactgtgagcatcacctctgatgaggcttgagggatgccctcagctgtggcactgcaataagccgtgaggagcccatttcaacaagacatgcccactgttccaactgtggcatgaatactttgcaactaaccaaccacttcatggctggatctaaagcctgttccttgacacagaacccacactggacactgtgaaaggggccagtgacctgtagcttagatatgtcataggccctagagaagaagccagtattgactgctaaatggatctatagagcacaaaggtgtcctgacccagagtggcaataggtaagtaaaaggagacaactgaaatacttttaaatacagggacaaataatataaaacacaccaatgtggattcctttacttgtgttttaagacaggcagcagtgcctgactctttcacctcaccccttgaactagtccaagacttctaagcgtttctggaatagtcatcaggcagaataaccatggttggataggtgttttattgaagacaaataagaacaaaggaactagagcaaagtcctctcaatagactgtaggtggagttctcatgttccacaggcgctctcaaataactgacttggaatcttaatataaattataaatgcttggtcagtagctcaggcttgtttttcaaactcaaattagccaatttctattaatctgtgtgctgccacatggctcctggcttgttagctcattttgtacggtcctgcttccttagtggctggctggcaactcctctgactccacccttcttcatcccagcattctcagtttggctctcctgcctaactttatcctgctcagctattagccagtcagcttgtctactaaaccaatcataatgacgtatattcacccggtgtatagaaagattattccacagcaataggctttatggcctccacatagcaagaggtgcctagcaggtcctcagacacactgcattcccaaccactcattgtcatctaagtgttccccatctacctggcccaccctgtattcattcgctctcctttgtctgaatccttttctccccttctgtggttcaaatcacatgtcttctagagagcagggaccgattctcacatcgggataaatgccttcaggggacatggcggctcgtgtgctcacaggtaagcactaagggggactaggaatgttaaatacacagggttgtctcttcaaagagagatgtataacctcttttcccccagaaggctgggagtgggtgtagttaataacctttgccctatccgtgtggctgagactacaccagatctccccccaggccttatcacgagcttgttttcctcagtcaatctatgcaaactgtcttgctgtaagatgtcacacatagtttacaaagaatttctatgtggtgatgtcttaagctttattgttgagttatttatcactacacaaaaaattttcaccaaatcatgctgtgcttaaatgttcctaaaataaactatttggcatcagactcttgaaatttgaagcaacaccagccactgagtcatgttgaactaaatttcctttttgctccttgcagaataacactctggtggccatgggatttgcagagacccccataactacccctttaatatataaactaagcctcagggtaatgttccttaactactgttgaagttaccaccccaaactcgcatctataaaattctagcaaatgtgtgtatatttgctgggtggttcttgggagagatggaagagatggtaatagtaaacaaactactccagaataaagtgtatctaccaatggtgtgcatctgaacacacacacacacacacacacacacacacacacacacacacacacacacacctgtcacgataaatctttctgccaaaagccgctgaaccccacagccacctgtacgctttatgtcagccgcctgcccgagttaggcccaaataaatacacagaaacttgtattaggtacaatgctgcttggccaatgactaggattctcatctgttagctcagtatcaattatcataaatctatattttataagacttatcttattggacgccttattggcgtccctccttgccggtggatcacatcgtgccgctggagcaggagcggaggggaaaagaggggccttcctgtttctcctttgcttaaatatgagtctccttgctatgtcactttctacctggatcagcatttttctactacatttcccagaatcctctttgacttttagtactgtctaactttctgtctcattggtcaaacagtattttatttaacaaccaataagataaacatacacagtacattccccatcacacaccctcacactcacaccacatgtacacagggagggggtggtatctgaagtccacaggaagagcaaagttataataatatcgtgttttttatagttgattccctaaggcgtcttcatcatttgcttttacctcatgtagcagctgccttgcaagaggctcctctcctctttctcccccttccagccttttctaaagcctggttcctaccacatgaatatcagtcttgccatccctacatttaaagagatactgataattgccagcatctagaatattaaatcaaagtgtcatcttggcagataaggtcctaagtgttatgcctcctcctttctgtttctctctcttccatccttagcgctctcttccagcattgcccctggcaatagtgtcaatcatccttccttcttagttccccagacatacaatggcctctcccaggcattttatggcctgagcagcctctttggtaagcaaatcctccttattcacccttcaagagaagtttgactagccacccagaattccccagacatcacagcatcttctgtccatcctaattcaccctataaaacagtagcaatttatacactagcggagtgtgacttctttgggtggaatgcccctctgttcccttggtaagaatgccctttcctacctttgtgcctctgagctcagcttctgaaactgagggtcacagctggatatggggttgtgtaactgaaggaaaactctggcagcattaaaaggtttctgaatgtgtggtgaccaaaacgctattcaaaactcaaatgcataacaagtcgtgtatgtgtgagtgtgtgtgtttgtgtgtgtgtgtgtgtgtgtgtgtgtgtgtgtgtctgtgtgtgacagagctctcctgtgttgctctgtgtgacttcactgtggcctaggttctgaacaaacagaatgtacactttgtaggccacatgcaatcatgtttcacagaggcgagaaacgctgcctgaaacatgtgggctcggatttgacactcatgtgttgtgagttgcagtgtttttactgctacctgcagatacttctctcacagaaacataattgtttgattcacagaagacgcagactttcagcattttcctgttgctgtcctcagtctatatgaggctagaatactttggcattggattgtatgagagtgtttgatcttaaatggtagtttgagctgctttcttgagatccataaaaggtcatttaatgaatgttggcttggggtcacagcactgtttctcatgacttctgaaagggttgaaaatatactgctgctgttttgtactgtgtctttacgcacggtagtcttctcagcatggaccattgagaaaaccaaaacatagaacaactctaaaaaacatcagagataccctgtagtatccagtaatcaaccattatttaattatacatgtaaaaattatcaaagacattcatctcagtatgcaaatggaaaattatatttaccaaagaaatgtctgacactctcttttaaacttttattgattattattggtggagggggtatatgagcctccatgtacatgtggtggacagaggacaattgattgacggagctggttctctctccacttttacctggattctgggactcagactcatgtcacaaggcttgtgtagcaagcgccttaactcattgagccatctcactctcctcttgctgacttattatcagtaaatgcttttacttgtctgccatttcatgtgctcgcttgcagaactttcttgggcttaaagaatgggagatgtttaagaagccccacctcttgagcacttggtggatgacataacatgcgcttttggtaatgaacagtcatgtgcaatccaggttgtcggggactcgggactggcctctacagtggtggtggtgggcatgcacaaggaaaggcaactctgcctgtggtgaggatttgtccccaaacttaagttctcagttggtgcctccaattctcccccccccccccccgttgctttggttctctttccatggctttggattctggacttttgaacatttcttttccttgttagttctgaatgtccttgatggttcactattatgccaccctctgattcctgtaaatggtaccaaataggactcaagccaccttgcccagggtcaactgttctttgaccagagcagatggactttcttcaactcagacatataggatgatgggagggaatggcttgctctgtccattccagtctcacagaatgatctagataagttacaagaagagtagtaaatgaaaaaatagtgagtcttacattttctactcccttcggaagcttgcttacctctacagaagagagagaatccacttttctatgccccgataattcaatcacagtcatccctgtcaatcacatggcatgggaaggaggcaggttcccccactggggagaaagttagagcaggatgtgtccagagcttgaccctgcatggtctcctgaccctgtatgacctcctgaccctgcatggtttcctgaccctgtatgacctcctgaccttgcatgacctcctgaccctgcatggtttcctgaccctgcatgacttcctgaccctgcatggtttcctgaccctgcatgtcctcctgaccctgcatggtttcctgaccctgcatgtcctcctgaccctgcatggtctcctgaccctgcatgacctcctgaccctgcatcacttccttcggcccaaagcaggaaaggctgcctcccacttcttccctgccctttagaggaaagatgtctcagcagcagaacagggaaccctgtggacactgtgagcttgttgctgttgtatatcaaatggaacacagagaggctttgttgagggctctgcctcttggaattctgaatcactatccgttgtctcataaatatgactcatttgatcaatggcaaaagaatagttttctctttgaacagaaaattctcttagtgactcctttgtttgtttgttttaattctgtaaaagtgaaactttaacttacttttgacctagtttccctagattttccgaaatgggctctgtcagctattatagacctacactggttatcctgaaatggtatttagttattaaacaaattaaagaacagaaagatgcccaagagatgtagagtatcaccctgggaaatataatttaaatcacatttgaattttgcttacacataagagataaagagccctaagataatgatgcccccatcctgaggaaaagccaaatagttacttccttattgaaaaagttttgttttttattatatgtatgtatctgttttggggtgtgtgtcatggagaccagaagagggccctggatactctgacactggacttagaggtgtagcactgagctgcctgatggtgctggtgacctgactggatcctctgtgggaacaccacacactcgtagtcagtgagctgtctctccagtgattttcataacccccccccccgccagggcccaggctaccaaacaaccaggaaagctatctataagagtgacaactcgaggggagggagagggagaagggacttgaaataagcttgttccctaactagaactaataaaaataaaaaaaaaaaaaaaaaaaaaaaaaaaagagtgacaactcctctgggggttccacctttggtacagcaggagtggcccctcaaagagcagccatgaagaaagcagttgaagtgcaaacaaaggctgagcaagggaaaagaagacaagtcatggttgttgggaactcaagaagtgaaactctcaccagctcacaagtcctctctgctgggccgctaatgagtagatttaatacacatggaggtgagatggctccttttggttgtcaacctgacgagatctggaaccaactaaaatgcaagccactgggaactgctgtaaaggactttcttgatcacatcatttgaagtggcaagacccatcctgaatgtgaatgatatcgtctggtgacagcccatataaaaagacatggaagaaagaaacttggttgtcctgccatttcttcacactgctggcgacctcatctatcctgctatgttgcattcctttgccgatgtttttagggtttctaacacagactgaagcaacatctctccaggacccctctaggcctccagtgacaagggtctgatgctccattcagccttgtaggctaagctactaccagatgctgaacctctccagtagaagacagctgttgctggactatctagacagtatcgtgtaagccaaaataaatgctttgctattctatgttgcttttggtcatggcattttatctcagcaccagagaaaataaacagctaatacttggggcaaagtagaagatggagcatcttccttgctggcactctctggaatggaaccagaaaactttccttcagctccaggcaggctctaggagaagatctacagattctagggcaggcaagtgacctttgctcttcagagggcaggacttgccttgagtgtcatcttgtccagttaggaagcagaagctcagttaatgctggcagagctagcaggagggaagaggttaggaggccggcctgctcagtttagtgtgctatgtttgtttttaatctacatattctacttttcctctgcagtttcaggctcataacctactcctaaaagcaggccatagaaaacagcatttctcttccccaaagcagaacacagacccttccccgccttcctttctggaaaatggctgtcaggacccccgatctgcttgtctaaggaagactctttcctagtcagggtttaatccattatcatcatggcaggaagcaaggcagcatgcaggcagacatggtgctggattaggagctgagagtcctgcatcttgacctgcaggcaatgtctcagaggtctgagacactgggtatggcttgagcatatatgaaacctcaaagctgacctccacagtggcacacttcctccaacaaagtcacacctactccaacaaagccacacctcctaatagtgccactcccaaagagtttatggaggccaattatattcacactaccacaggcccattcaagaagagctctgctccacaccctggagggaaggatgctccatatagactgaggggaacctgaaacattcagcctattagcattgcatggcatccttttaattcaaccttattcaagcagcattgcctttgcctgagccatgtttatacaaggaattcctcataaatcccagtgggacaatagccgcctgagttctgcccactgtgttagggtcccaaataacacacagagacttaaattgggtacaatgctgctggccaatgactaggatttctcatttgctagctcagtcttaatcatcaaccacaactattaaactatatattttataaacttattttactgaggatgccagaagcaagcgtcctttcttcccaggctcacatggcaactctacagagaagagaagaggaggaagaagaagaaaagaaagagatcaatttcctgcttgtccctgcttatattctgagtctgcctgctatgtcacttcctgcctggatcacaagacttctctttactacatttcccagaatcctccttgactcctacttccacctaactagctacctcattggccaacagtactttattcaacaaccaataagctaaacatacacagaaggacttgccccatcacccaaagagtttatgggggccgattacattcacactaccacaggcccattcaagaagagctctgctccacaccctggagggaaggatgttccatatagactgaggggaatctgaaacattcagcctattagcattgtgtggcatccttttaattcaacctcattcaagcatcattgcccatgcctgagccatgtttatacaaggaattcctcataaatcccagtggacagtgttcaaagaatttccaaatagttgagcacatggagactcttggaggtcatggaagtgtcgcacccctttctgtgtgttgggataaactttttgtatactgtgtgaagaagtgtctctgtccttgcccaaggcacctgctgactggtttaataaagagctggacagccaatagctgttccagtaggtgggacttctagggagatataggaactctggaagagaatctgagatatgggaggatcaccagccagatggagatgaagtcagatgtacagtattgaggggagttaatgaaccaaccacgtggcagaatatagattaatataaatggattaatttacattttaggagctctctctctctccctcccccccctctctccccctctccccctctaggtgactcagcattcagagcacctgttgctcttacagaggacacttccagattcaattcccagccctcgagccttaactcacaaccatctgtaattctagttccaggggatctgaccccctattctggcctccataggcactagcattgaacacatttagtgcacatacatatgtgtaagcagtatacccatatacataagataaaaataaatattcttaaaatagcattacctatcatatcatcaaggttaattattataaatagggaggaagcacatgaaaaaatgtcagcaaaaaatgagtaggatataatgtgtgaagaatagtttctaggggctggggagatagctcagagcttaagagcactgactgcttttccagaggtcctgagttcatttcccagcaaccacatggtggctcacaaccatctgtaatgagatctggtaccctcttctggccctcagggatacatgcaggcagaatgctgtacacaaaatgaataagtctttaaaaagaaaagaaaaaagaatggtttctagtaatactttcctctgcgcccagtatctcttaaaatgatggtcttggccatgtaggataaagaacctagaacctatgaaatctgatatttaaattctatttatcaatgatattcactttcaagtaggctaacattttggcttatctattagcaaaaatatgtattttatttattctgtttgatcagacttacaatttttgacagagaaaaaatgaacacagcttcaaatgtgtcttattatttttttttcatcttaatcacagaattaaggagtacttcctcaaaatttcacattttgtacagtccccatgccaaactgagcatggcagtgttactctttacttaagtagccaatgccacacacagtttggagtacatctattagggagacatgttatctgtgaaataataaaattcattgatacttcatccaagaacataataacacatgttcttgccttcttgtgtgctaatcaggggatctcatcaactacagagagtgtggtggtttgaaggagaatggcccccataggctcagagatttgaatgcttggtctctagtttgtttgggaagaattagggggtgtggcctcattagaggggtgtgtaaccaggtggggtgggctttcaggtttcaaaagcccatgtcagctccagtccttctccttgcctccgacttgcagatcagggtgtaagctcacagctactgctccagtgctatgcctgtctgcttgcagccatgatgaccacggagtcaccctctgaaactgtgtgcggtattcccattaaatgtttccttttattggttgtcttggccgtggtgtctcttcacagcaataggaaagtgactaaggtgatttggcacttgtgtagccataatgtgacattttgaacatgtgaaaaattcttttggattcttctccgctttccaggtcttctaaatgatgcggtttgtttcaacggttttcaaagcactttggtacattgactggcatgttgagttttagtggaagtgcagagcctgtactttcctcactgctgtgaccagcatgtgacagcatgtgacaggaagcagcttcaggaaagaaagagttattttgtcttacagtttgaggagatacagtacatcatggagaggagggcatggcagcagtcccgccatggtggccacatgcgcagtaggactcacatcttggaggacctgggagcaggaagaaggcaggcagtgggctggactgtaaagtctcaagccccgccctcagtgagccacttccttctgtaagtttccactgctaatagtccacaactttacaaaactgccgcactagctcgggtgcagggtgggctggcggcatagtgttcaaatgcatgagcctgtgggaacattcctttctcaaaccacagctaacaaaagactgttatttgtcgccagtgggaggttaatccacgatatgctaatgcccttatctgccccttcctttctgactatttctggttctgaataatgaaagcttatctctccatgtgggcactccttcccatatttctctttcaattaaaggaaatgtcctggctagtttcttaccaactggacactagctagagtcatctgagtggagggagcctcagctgagaaaatgcctccataagctcaggctgtaggtaggcctacagggcattttcttttttctttttggttttttcgagacagggtttctctgtggctttggaggctggaggctgtcctgctcttgtagacctggctggtctcgaactcacagagatccacctgcctctgcctcctgagtgctgggattaaaggcacgtgtcacattttcttaactagtgatggatgggcgagtctagcccattctgggtgccgtcatccctgaattctatgagaaagcaggatgagcaagccaaagaaagcaagccagtaagcagcaccctccatggcctctgcatcagctcctgcctccaggtccctgccctgcttgagttcctgtcctgatgtcctctgatgagccagataagcccttttctccccaagttgcttttggccatggtatttcatcacagcaacagtgaccctaacttagacaggcagctgtctctcccacaagccttctaccacaggtctgcctagtggcttatcctgcccttccatatttattctagagcgttgtctagaacactctccctcttcagcatcacagcatttaaaaatcttattctttgtgaacttcttacaagaatacaaagaaatctgatcgggatcattcccttccccccttttaccagctgtgcaattttgagcacgttttcaggcagtttttaaaactcgaccttctgtttttgaagtggcattagggccaagtggtagagtgttttgcatgtgtaaagttctggttcattccctaggactcctagtaaaagagaagcacacacacacacacacacacacacacactataaaccattcatttatactaagcccacacttaacacagggtagctgtgatttctgccttatcaacattagctggggtccattaagatagcagactttaaaaagtatggtttagggattgggcgtttaggtcagtggcgcctagcaagcacaaagcctcatgctccatccccaggtttggaactgcagggcgtcaggctgagagcaaaaaaacccgaatccgtaagcaagacaaaatcgtgtgtatctacagtctagaaacctgtagctgcccttgcacaccccaggagtggttttgctctgtgctgtcctgggctctggcagcagggaagttatggcgtttgcaggtaatgcactgtaaggtgttcagattcttaactcttcattgaatgtgcacacgtgcattagccgtcagcccgaacatgtgtgtgacggagaacagggaaaaaagcgaaatctgagctagtccctcagccccagaccggcctgccgcctgaagccccgccctcttgcaggccccgcccagtctactccgatgaagtgaagcgccaacgctgcgccgttttgtcccacgcggcgacccgtcgtcccgacggctgtggcggccgccatggaggcgagcgggccctgaggagaggcccggccaggccggcggcctgcagccgcgagaggcggaggcctgggggcacgcaggagggaggcgggtgcgagccgggacgccgcgggaggctcgtgctccgtgtgtgctcctggctccggcccggccccggccccggccccggcccggccccgccccggccccggctccgaccccggccccggccgcagacatggcgggcgggcactgcggcggcttcgccgcggcggcggccagcagcggggagatcgtgcagctgaacgtgggggggaccaggtgagcccgcagccgcgcggggacaggtgggcgggacacttgagcatctgcagctcaggtggggtccccgctgcagcccgggcggtgtctgcagcccaggtggggtccccgctgcagcccgggcggtgtctgcacggccaggtggggtccccgctgcagcggggcggcgtctgcacggccaggtggggtccccgctacagcggggcggcgtctgcagcccaagtggggttcccgctgcagcagcccgggcgctgcagtctgcaccgccaggtggggtccccgctgcagcccgggcggtgtcagcagcccaggtggggtccccgctgcagcccgggcggtgtctgcacggccaggtggggtccccgctgcagcggggcggcgtctgcacggccaggtggggtccccgctacagcggggcggcgtctgcagcccaagtggggttcccgctgcagcccgggcggcgtctgcaccgccaggtggggtccccgctgcagcgagggcggtgtctgcagcccaggtggggttcccgctgcagctagggcggtgtctgcaccgccaggaggggtccccgctgcatctcgggcggtgtctgccagccgaggtggggtacctgctgcagcggggcgatgtctgcacaaccaggtggggtgcccgctgcagcccgggcggtgtctgcacggccaggtggggtgcccgatgcaggcggggacacgtttgtatggccctaggcgccccgagcattcctcatagtctgttctcagatcgagtgcacaaattgttagaactgtctttattcctccgggttcttagggtgtcaggctagaggagcacagttggcatgctgggcctgtctgagctagtgactcagggcctcccgccggctaagcaagcatgctgacagggagctgtaagcatgcattccagcaggtggtagtctctgtgaagcctggtctgggcctccctttctctaggttcacctagctgtgggcttagctggtgttcccttgaaagcctgctttggtagagactgtgtaatactaatgtcagtgcaggggaccagatagatcaacttcgccgtttatttccagagttgctcttgatgcatgaacaggaagggtctgttccacttgagtgtgtctaaaactggcttgtgagcaccttcggtgttggcaaagaggaaaccagctgtgttcttgatcctctcttaggcctttcactcccattctgtgccttacagtaagttagttggccataaaacaatatcaaaagcaagcaagcaaacaaacaaaaaaacaacaatcaaatctgtttttgtaggtttgtcaggacttacatattttcttctcagaaaagcggttacgtgccggcactggttgaggggagtttgggttttaggcctaaggatgtagggagtccagatacttgggatataggctgttttactgtcctgggaagactatttttcattgtctaggactttaaacatggaaccgttttgcttatttaaaaactacaagttaacagcagtgaaaaaagtgaggtggccctctgggtgctagagaactctgagttaggatttgtcctcatatgctgtcaccttttcctactgagcaaggcttcttctgcattgtatacataccaggtcatatgcaaatgtctatctcctagtgtaagaaatgtggtttccctgcccacctaaagttacatcaaagtattgcaagtagcttggtatgcaaaagtgaaatacttcatacaaagaggtctgcagggtgtgttactacagagaagcaagattatgctcatttaaaatcttgacagtgtggatggctgacatccttcctttcaggcactcaagagaacagagggttacgacaaaaactaagctatattgttagtgtggaaaagattgttaattgtcttaattgtgcgtgtggatgcaggtgtctgtggatgccagaggaccccttagagctggagtttcaggtgtagtgagttttgctgtgagccacctgacgtgggtgcgaactgaattctgggaaccaaacaagagcagcaagtgctcttcgtcactgagccatctcttcagccctatgttgtttattgtatattggagatgggtgtggccagcatgatgactggctagtcacttaaggaagcacacctgggaaccctggtttcatccttgaaaagatgaaaagagaaagaaaattgttctctgacctccgaatgcagaccttgacatgcccctccctacccccaggacgcctgtatcagtaacaaaaataaaataataaaaaagaaagtggatgtcttaatgactgagctccaaggactacaagcatactcaagctctgagtcttgaacattttactttacctatggaatttttcaaagtgctaattagcagagaatacaaaatatgacaataaatttattactgatttgaacattttagcagataaaagttgttaggtaggaatgaaacataaaagtaaacattcagctttgggattattagggttgattatgtcacaaacaacgacagcatttaatgccaagtgttggaacaccactttccaaaggtctttatcgacttacacacctgttagctcttgagagccagaggagggccagaagtcatgtttaccttgtacaaaacagtttggcacagttaagacagtcacaaaagtccctggaagagaaaaaaagcccttctgtgagtggctgtgaagtcaggaaggcctgatgggagatgacctgttgcatggcttgaaggaagtcacagagtaagacgaaaatgtgtctattgagaacatggaagccagacacagaagcatgctgctcaaggactgagacgaacgagcaggattttgtttgacttagtacttggtgggctttctttaaaaacaggtagtgtttactatttacagcattagtgaagaatcccagttccactcaagatctgtttacttaggtatcagtttaggtaggagagggccacttgactctacttgtggacagtttgggggaacaaactggcttcttgtgcacctagcaggccctccaagttggcacccttgggcgagttactttgtagtgctcagtttccagaaatgcaaagagaagctagtgccagaccatggactgatggaggaacttgagggactaaacatgaaaggtgagggtagtgacatcatagtatggttcataacaaatactttgacttgggttactttcatattttcagattggtttagtggcaagctgctagagtgaagtataaccggatatgcacatttctctagtgatcttttgatgtgtttgttatccatctatccatccttggcacacttcggatatgagatgcaaaacagcaaaggctctcatgtatatgtaacagagaactatgttaatcgtatatacaagttttcctttctctttgcccaaagttgcagattgtcttctggggtgggcttgacgctgatacaatatagcgcaggcttcccttgttctgcccgtgactgtctccacctgttgagtgctgggatgacagcagtggggccaccatgcctagtggggcattatgattttcagcaggcctgtgtactgtaatatggttttctgaaactgatgaacatgggatgtcagaagttataaactatctgtgtttgtttccttgctgtgacagaatacccaacaaaagcaactggaagaggtcagagttctgggctgtgttggagcctgcagaccacgatggtgtcaaagcttaggggctggtcactctgtctgcactcacctagaggggatgtgtgttgctcttcagccctttgctttgtattcagtacttctgcccagagccaagcagcatcactccatggcctctgcttcagttgctgcctccagatttcctgcctgtagttcctgaacaccagctagtgacatgacagaagtgagggtcatctaggaaattgtctccttaaggttagcctatgggcaaatctttgtcttgattaaagatggatgtgggaaggcccagcccactgtgtgtggtacctctcttgggcaagtggttctgggttatacaaaaaagcaagctgagcaagccacgaggaacattctcttcattgctaactgatagaggagggcccagcatgctgtgggtggtagcaaccctaggcaggcaggcaggcatgggctgtatcagaaagttaaggaaaggggagccagcaagcagcgttgctccatggtctgctttagttcctgccttggcctccttcagtgatggactgagacctggaagccaaatatttctccctaggttgattttgatcaatgttttatcacaggaatagaaaagctaggcctagggtggatcttcctacttcatttactctaatctaggaactccttcacagacatgcccaaaggcttgttcccatagtgattctagacaatctgaactcttccaccgtcattccttgaagttatctaatgcttcagaaatctagtctttctgtggatgcctctgttcaccattgactggttttcttttttctttctttctctctttctttctttttttgtttttgtttttcgagacagggtttcgctgtgtagctttggagcctgtcctgatactcgctctgtagaccaggctggccttgaactcacagagatcctcctgcctctgcctcccgagtgctaggattaaaggtgtgcagcactaatgccctgctgactggttttcttttaattgacctaagttttctgtgactagtggtaacctgtgttctattaaagagtttgctaagacacatccttaggaaacattgccctgtgttcttgacaacatgtttattgaactccttcctgtttatttatgtctttatgtatttatttgagacaaagtctcactggcctttaatttactatgcatcccaggctggcatggagctcatgccattcctctgcctcagcctctggagtagtggaattataggcatgtgccacctaacctggttttagctcctttcttagtctgagaagtgagcataggaattacttgacaacacttagattatttataacttgtgaaattagttgagagttagcatctctgtgtctctataagatcttttaatgaaagagatgtagagatatatctataagaaatgaattatttggggctgcagagttggttcagtggttaagggcacttgttgctcttgcagaggacccaggtttgattctcagcacccacatggtggcagcaactgtctgtaatgccagtcccaggagaatctgatgacctctactgcctcctgtgggcaccaggcacacacatggtgcaccataagatagtaaaaataaatacatctttaaaaaataattatttccctctttcccctagtaggtcagtgagaggatgtgtcttctctacagattgtgaattgtggatggaggaagcagagttaattttttccctatgattaagaagcttgctgtgataacagtaggcgatgtctgtgaggtaaccgggctgtatcagacattctgtggaagggagcttgtactttttttttcctactgtcactgtcattaggtgacataaggcctggttatgccaacggccacgtggacattttggtaatgtgtttatcaataacttatgtggaaatgttctgttgttaccatataaagcctgtaggttgaacaaaggaaccagtgtctcagtttctacgaaacacttaactgtgcacctgattatcacacctctgtttcagagtagctattggatctgtgccagtgccaggctgccatccacttttaaaaaacattattattattattaaacatgctcctaaaagtaagcttggaagctgtagtttttaaggagtaatcatctatggagaaaggacatgtgttaaggctgtgctgtctcagtgcttaggtgtgcattgacctctgcggtcctcagcttggcctgtggtccactgacgtttgctttgccacttggaagatgcaaatggaagtgaaagaaactttgaatggcaggctgggatgaacaaggagcagacagtacccactttgctcatgtattggaaacaggccaaggatgctgtatagagagcattgaatacataatttacacaagttactagttgctcagaaagaggttgtatgggacggaatttctggaaatgccattgtggatttggtaacccagtagtgtcagcgacacggctgggacttggaggattggccttgaggaggaaggtgactgagctgggatgaagacataagaccaaacacacaaagtcaagagactgcagcggtgccgaagatctgcacacagctgagctgagaagttgagattggttgtgagggactaaagcaatgggagctttagggggcattgcgtttggtttttctcagagctgtttgagaatcttaattcagattgcaaagtggtaaaatctgaaagtagtaaacatgataatcaatgcctgtgcaatcatacctgcctgtagcatcactgtgtcttgtctaaaggtgtgttctcgttggtaacacaaggtgatttcaattgcagattcagtacctcaagacagactcttatgtggattccagattcttttttttccaggtaattaatgtaattctttatgcttttatacatttgattagttgccaaaatatgaaaattttccttattagttagattaagattttttttataatttgaattaatttataaattaaattttattgtttttgtactgttgagaagggttctgctctgtatccagtctggtcttgaactcctgttcctcctgcttcagcgttttagttgttggtgttacaggtatacatccaacacctggttaaaattgaggttttttttttttaaagttggagacagaagtttgcttgtgttggctttgtcagtaaggaagttgtttatattcagattttgtaactaattggagcttgttttatgactcctagcttgctgagtggaagaatttcaacacttcgagatgaaactggcgctgtgagtataatgttgtgtttctaaattcagtcaacaaaagcttgtaattcttagtgtgagtgacaggaaagctcacattctaggaaacccagagtaggtgtggcattttaaaaaaattgtcacattgagtgtttctgaattggaaagagacccctaagcagtaactgttgtatacagtgatagagtggttgtaggatgtagcttgcattgacaattgacagaatagttccttagccaataattgaatcttaatttaatagtcaataagtataaataggtaaatattttggtattagagtggtacaaatttgcaggtgggtaaagtcctacaattctttatgaacctgtgaggcaatacagcgtggaaacaaagtcctgtaaaatttaagccaagagattggttttagcactttccacattgccttggatgcagtggtgttcagacaactactgttagcaacagtgacaacccacaggagcagtgtgaagttgtttattggatgagatttgcaaaataaagcaccagagcagatgtgtctgcaggaagttattttagctaaaagttaaataaaaaacccagtttgtggttttcccattggaagcatctttgtcttgtgtgtgctgtgaccccccatctgttacccacctagcccttgaagcagacatggtgaagtttacccacctagcccttgaagcagacatggtgaggttgtcagctaagcctttggaaggcctgcactctaggtgacagctatggtagccccaactgctgtctgtacagaagtcacggtggctgcctcagtgggtgctgccagagcagcctgaggttccccgggggtcttcccccaagcattgtcagtagttagaaatgaaaacactcacatgaccacactgactgaccacagttataccattggagtcttagaaacatcaaaaccaaggaaatctcagtcagcctctgttgaaggggggggacatacattttgacttgataataaaacagttcttcacttgcagatatttattgatagggacccggcagcattcgcccccattttaaattttcttcggacaaaagaactcgacttaaggtaagagtctgatcatttttgaggccttgctggcagccagtgtttgagccgttcacaaagtaatgtgcctgcccaagactgctttttagttgtgtgtttgtgtttacctcggcacaccgtgttaacagttattgagatacaagtgtacagagtgtaacagtcctggcttgggaattgcatcatctcctcaagtaacatcttgtgttgggaccctttagtgcttccttggttacttgggcctgtgtggctaattgtagactacagtgccagctgtgcagtgtcccttgggccccacctgtgatttgttatctgcttcttactctccctcccctcagtccacccttctagcctctaagcgcctctgatccacctggtgaccaacaagcaccctcagctcaagttggatgggtacaggcctccaggccccgtcctccagggtgttgtcgcagctccctgggcagtcccctgctttgcatgatgtgtttcattcagccctgcagccagcagtctgagtctgaccgggctgctgttctggcggaaatgcagaggttattttggacgaatggctggtagttttgggtttggtcttgcttgtcaatcttctgcctgtgcgtaatttctctcacagtcgtgtcagttcttggtgtctggtgtgctgtttgcctaagacttcctgtctgtcagtgtctcagctcttgctgtaaatatttaaccttcttaccaatcttctccagcaggcctcaactccagaagggcacccacttttcactatgtgcccaaggctagccttgtgaccgacatatagtagatgatggatgattatgagtcatgagcgatcacttaaaccatgtctgtgaattcgccatcttgacttacctaccacattcctaccaggaagctttagttagtgtttttagcaacccttcactaaggctctgaatttttttgtagggataacttttggtgttaccattagctgctgcttcactgaaggtgtgctctttgcagatgaaaatgtgcattcatttattttggtccgatttgttccctgccatattcccagcgcacgcacgcacgcacgcacgcacgcgcgcacacacacacacacacacacacacacacacacacacacacagatccgtgcagaccaggcatttactaagtcagaagaagagcattgggtgtgcttgtttgggttttgtgtctgggcctggagtcagtgagaggcgggcagtcagtttcccgaatgagattgttttcttgcacataccgtgtgtaatcagaaagtgtcaagtttgcgcccagcagaattaaattttatgactggttcttttaaaaagaaaggaagaaatttgtaaaacattgttttaaccgtgtttcttgcatttttgtattgctggtgccactcgctacacatttgttcccagctgtccaggggcctgcctacagctccttgaggggccagccccgagtttgtcttgagcccttcctcgtcgtgagcttttgccattgtgccattgtcttttggtttatttatcttatggaagtattcagcatttgtgtgtgtgtccgtccatccatgtctgtgtctgtgtgtccatgtgtccaaactaaggtagatgtctgccatcttggatcactctctctgccctttatttgaaggcagggtctctcagttgaacccagatcttactgtcacttggttttgttttgctagctggcttgctctcaggtcctcttagcctctttgttctgcattctggggtcacaggtgggctgccacacccacctggtatttctgtgatgtggacggatctgaacttctacccctgtgtcctcatctttggacttcagttgctctcctccaacccttcctagcccctaccttctagtggcaggtaacacataaaacagttaactcccaagtctgtctgcttaagggttctctcttctcataggagcagagcgctggggggagccttccagtgagtcatgagtgctgtggctatgagcacagtctcttcacttcttatttacctgtcacctaactttgctaccctgtggcgacactgtcttcatctggatacaaggtccttgctggccttttatcaccagactgcattttattttaccagcacattttaacacggggtgtgagtgagcgctgttctggctcagtgaggaggtggtgaaacttggagggtgctcgtggcacagcaggaaaggctagagtaggaacagaaaggattgtggctaagaagtctagaaagacgatggtttttgctggtttttttttttcttgttggttctcaataattgtattagccctcttattcacacaaatcatcaacatatgtaaggttttaaggtaggtaacaaatgcttacattttaaggttttatttatttttgatatgtctgatgtttcgttcacacatgtgtctgtgtacagagaaagttggagcccctagaactggagtttcaggtggatgtgagctgccctctggctgcagggaactgaatctgtgccctctggaagagcagcaacatccttaacctctgatctctctagccccaacagatgttgtgttctatgtgatgttcctttagactttgagatgattaatggcgttacaaaaagaatatgagaaaaacaagatttgagcttgaggccccatcccttgtgtctggtgctgagtttctcctttgtctgtctccatggtgggcaggttgtctgtgtggagcgctcacagccttcatttgtttctttgcaggggagtgagcattagtgctctcagacacgaggctgagttctacgggatcactcctctaggtatgtactcatctcccaggactgaccctgtgtgacacacttgcccaaaggcagtgtccttctcatgtcctcctgacagtagcgtagtgcttagtgtctcctagtaaaagggtgacctcagctgtgagtcccctctaagcatgtcacctttctcctctcactgcccttaactagagaaagtagacatggtggagcaggtctgtgtttgcatgtcccctgacaagcttgcgttgactgttacagtgcgaaggctgctgctgtgtgaggagctggagaggtcgtcctgtggcagtgtcctgttccacggctacctacccccaccaggtactgccactcagatttatccagacttgccattgagcaagaacaaacataaagattagaaaggccttggttatttgagtttcagcaaatctgagccccatcggactgtgcccttttaggagagtgaaggcctcacattatgtagagcagggcctgatgccttctctgtaagggcccaggaagatagatcaccatggctgcaccacagctgccgtgtacaccacagaccctttagcccgaggacttgagcccaggagccctgcagggttaggtcagtgtcctctcggttactttgcctgtgcagcctagtgcttctgagagaggggttgtttttgaaaagatcccctctgaaagcatgaggagatgaagctctgaggcagtggatttgggcatggctaggatgacatgtgactaccataagcctaaagagcagctcagactggatggatgattgctcagtacactgaagctgggtaaaagggcgggcacatactatgataagccttaatccatggtctgtgaatagtaaaatgccaggaattgcttgggttgtgtcttctttatcttttacttgttatatttaaactgtttgacatacactgatgtgtttgaagatctattttagatataacaaagtttagatgtttgtgtccctctgttacaatgtgatatttttcatttttggaagggtaacagataaatttgtgtcctgctttgtaggtattcccagccgaaaaataactaacacagctaggtcctctgtggatgctaggaatggactcaatgctaatgctacagaagacgaagcccggggaagtgggaccccacctgggctctctggaaatggagacgagactgtcaggctgggtaagtggggttgcagagcagagaaggaaagcttgtgcttagttcttagggacaggctgccatgagttttgactgttgctcttttgctgcacacagaccacacacactctcttatactctcacactctcttacggtgctgtgtgttgaacccatggctacagtactgagtgctatagtaccgagctacaccccagccctttatttcctttttaagtccagattcatcatttatatcttggaaaatctcatttaacacttttattagaagtgtaatatgacctctgtttttatttctttctgttgcttttgtctgtagaacagttgacaagctttgtgtgagagcgagctagtgagatcacattttaggctcctctgtctgatgaaggcatgctgtgtagtgtaagctatgagcatgctctgctctgaccccctttcacccagacagacagaggcatgaagtggcctcagagccagaactttccgactcacttaagatgtaaatgcttctctctaaaactggcagggttccccgtggatccgagaaaggtgctgatagtcgctggccaccacaactggattgtagccgcctacgcacatttcgctgtgtgttacaggtaccacgtccttagccgtcatttggttttattttaggtaattatattgtctgtttacattgaatatatttgttctagccaccaggttttcccgcttcacttggtaaaaatttagtttttacttgatacctactctagtacctaattctgatagcctaattggctgctgtgtttcccagacagtggaatctgtggtgcagaggagatatgttgctctttctggctcacttagttattacattgacagcatcaggcaggattctaatgtgagctctgcagtttctttttcatgatgagtcagtgccgtactgtgcagcagagccggggggagctctgtgctgtagagttgccacacagttgggagtagccaggcagagagcagtgtgtggagagtgacacagctcagtgtctccagcgtgcggaggtttaaggtacttggattagactgtaagtggtgaaaaggagtgcagagtccaaagtgagcttgtttgtttttaactggggaagttagactctgtgggccacaggcagtgctgctgatagcagaggcagagaggtggccagaatttactccctcactttgagtgcatctaactttgttgtttttaaagtcaaagaagttagaaatttttgtcactttggtttagaaaaaaaaaatagctgaagttttgaacaatcctttaggacttgtttacagtcccattgcgaatactgaaagtgtgccatgcaggtttgcctctggagggagctgcatgccacctgcttgggtgtggctttggttgcagtggtgagtaaggtgactttgtcctgagtgcttttcaggtttttaattgccaaagagtatagaaatatggggtggttattttgtagatagctcatatatcatgggattaatttagcgaacggatttttttatagttgttttgtatttaccattatctgagtctaaactggttgtttaattattgacagggattctaggaacttgcttggttgtgatggttacgtagtgtggcagctgtgccctgtcaccatgctatatagagtgttgaagagaatcccacaggaggacggttgggagaaggaagagagatgctgtgctgttcacgtcattgcttgcatctgcttttgtggtctcttgcttaggctggcacagtctccctgtagctggtgatgcaacagtgtgttaataatggagggtgaccgtgttggctttccttgtaaacttcagatcacacagcagattgatgataaaatagatttcaaaaggcatttcatagaaccttttaagatcatggtcttttataggataatttacaatggaggatggtgtggtggcctctggaggatggtgtggtggccactgtgtgcttgcccataggccactctcagagccaaaagatctcaccccccccacacacccccaagtgtggcattagtcctgcagtgtggacaatccctgctttgtgcccagtctgagagagtataaaactctacatttcattctttcaatagttgtcagtttttaagttcagtggataagtgattttgtttatcttaacacatcactcccatctggtggctgagaatggtaattacagatcttaaaatgtggggaaaattgttaaattttaccctttattgctttgaagcttaagttaggaaaacattaattcttggttaaggcttaatttagtgagctgtggttgtactccttgagcatacatatttaaatgaaagtggtggctcgtgcctgtgccaattaaacagcacatgctctgccaatggccaccaggttagatttcaccgagtgccatagagtgaaagggcagctttgtcctccacctgctaggcaggaccaggatgatactttcgctgatttcatcgtcatgatgatataaccaggctgtgaccttggaggcttgctgtgccgtcacatagaatacctgtctggaagacctaaatccacataggacagaggaatctattgaaagtgggaaccaggcatggtggtcccggtctccaatcagctcttgagagtctgagccaggaggagtgagttgtacttcaggccagcatcaagtacacagaagaccttatctcagagagacaggggaagggggggaggaggaggagggggaggaggaggaggaggaggaggaggaggagaaggagaaggaggagaaggagaaggagaaggaggagaaggaggagaccccaagggggctatcacctatactcactggggaaaccgaaagatgttcttgctggaatcagcggtctggtgaaggtttgcatctggagtctataaaccatctcagaagacttctcagcctcactgtgcttctgttctagggaactcaagttatgatgtaatgccacctagagtacagagaccagttctcaccatgccacactagtgacagcgttaatatgattgctaacaggaaggaatgcaaactccatctaaaattctgactgttgttggccatcattgtccgtacagaatgacagtaatagctttgtggggaaatgtgagaaatacaactatattaaaaaaaaaatttaaaagcattttataaaacttaaaattctttggagaaatacatattctagtccttttttgtggtcatgtgtcctatgtatgtaaatgtaagatcaggaataatactgtctttagattgtaccaggttttttctttggggctagctcccaaatcacaacacagactaatgattagttgtaagtgttctacctagcttaagctcttttaaatggacctgtttaatctctctaccttttgcctctgggctttttatcttttccttattttcttgctgactctctgtctgatggctgcttggcttcttgccctaggtgtctttctcattctcttctccttctctctcatctcctcttaagcctagatttctcctccttttattctgacttctaaccctgcctatcctttgtcctctctagctattggctatgtaggtttttgttagaccaatcaggtgtcttagccaagcaaggtgaaacagatccataatttaacacacatctttacatcattaaacaaatgcagcataaacaaatgtagcacagctttacacagttaaagtaatattctgtaatattctatgatagtagatgatatatcaattgcattcagtaaacataggtaggtagaaggtgtgatcttggtttttttttttgctatgttgatttatgtcttaacagaatcaaagagtcttcgggatggcagcaagtgtttacaagcccatatctggactggaccattgaaagagtggctttaaatgcaaaagtggttggaggtcctcatggagacaaagacaaaatggtggccgtggcctcagagagcagcatcatcctgtggagcgtccaggacggaggaagtggaagtgaaatcggtaggagagttttccatggtggtgggcggttgtccatgtaagtgagacagccagctcggcctgtgacacttcctgctggggcccggtggccataggcctactgagtgagaggatggtgtgtcagagggagacactgacgcctcaggagggagccctggggttcagtttgctctgttcaagcctggatgcagcacagaaagttgctccttgctctcagttccattgagtggtggctgtttccctccactctccccctctgagggtgggtaagtagctcatgttgtcttgtttctatagcaagatttctcagaaccagagctctcttaggttagtcaagaccagaaagtgtcatcgtataggttgttatctattggcattcaccttgctagaaattaaattcacagttttaaacactattgatataaaaaaaatcagcagtactaaactcattgaatggtagttcaaattacatgttaacaaaagagatgttttccaaaaaggaaacttgtgagacatagatctccatgatgtctttttaaacttttgtttcatgtgtatgtgtgcatacatgtggcttctgcctatgtgcgtcagtgtacatgtctgtggattttcaggaatacgtagggtgtcctgccctatcattctctgccttactcccttgaggcagtcattcactgacttggagcttgctgggtttttcctaggctgagcagcaagcccagtgatcccactgtctgcttacatcctatcgctaaccctaggttacaggcagctaggacatttttctctctgaattttcaggtgtgtgctgggaatctgaacttgggccctcatgtatattcagcaagcactgttactcatttgaccctctccatagccctgtgcaatgtcttttgtaatttttttaaatatcattttttttaaagatttaggtatttattatgtgtacagtgtttctgtgtacatgtctttctgcaggccagaagagagcaccagatctcattaccgacagttgtgagccacaatgtggttgctgggaattgaactcgggacttctggaagaacatccagtgctcttaaccactgagtcatctctccagcctcctcttttgtaattcttaagtctgtttctgtatttagttttctgtgatacattgtttttgttgatatgtacaaagacagggtggcctgaaacagataaacagttgggaaaacttttttattttttgaatcctttcagataactgtggctctttcccttgaatcttgcaccagaattgtgcaacttttctgactgctgaattgaaacctaccagcctgctttgctcttcgaatgtggtctttactccaggcctggatctggagtactgtgcttgtcagttggaaatgttggcttgctgagttaggcagcttctctggacactgataacattcattgtaaacgctgacaccaggccttacatgagcactagtcacacatttgactccctgtgttaggaagtggtcaccttcctgtcaggtgaggtcttcagaatactcatcttcacctgaaacttcagtagtggttttccatcagccgtctccccacaaataatgacacagagacttattattaattataaagcttggcctatggcttaggcttgttcctaactagcttttataacttaattttaactcatttatattaatctatgttctgtcatgtggctttacctctcttccctcttgtaccttctgtttcctgtcagtgtccgaggctgtctaccctagattccccctcctcctcttttccctggaaatcccacctatacctcctgcctgcctagctctcggtcgtattggttttatttcagcattcacagtaatgcaccttcccacagtgtacaaatatcccacagcacgaaactggctttttatagctggtaacaagtaacatctgatgttttccttgaattaggtttgttttgtttatttctggggaacagtgtgccaaataccaaatctctttctccaccttctccctctctccttccttgtttcctctcagtgagggtctgaagtcttcaagcaaggcatgccactctgagatggcatcttatctacctgtggctcttgggacttcccaccattccataccctcatagaaccccttcatttatcctttgggtgtctttagtgaaacccctgtgtaacttctgtgccccacccccatactgtcactcagtggccacctctgtatggtctccacccccacccccatgctatctctgtggtgatgtgaccttagcgaaacccctgtgcaatttccgtgtgtgtgtgtgttgtgtgttgtgtgttgtgtgttgtgtgttgtgtgtgtccgtgtccgtgtccgtcccaccacacagtgttcatctctgtatggtgatgggaatcctggaatccaggaagacagagttgcctgaatcttgagtcctttgctgccttttgttcattgctttaaatgtcaccttgtattttttccagttttgctgttagtgttttaaagtgtggaataattgaatatcatttgtcctatcatggttgatagtatggccttctcccttcagtttgttagaaaacaaattttaatgttaagtacacactgccatgctggctagtttgatgccagcttgacacaagctagagtcatttggggagagagagcctcaggttggcccgtgggcaagcctgtggtacattctcttgattgatgattgatgtgaagggtcctggtcaccaccgctgggcagtatttaagaaagcaggccgacaagctgtgatttactcctcagtttgtttccaaagactagcgtgatagggagccgtggtaggagctggtcccatagcagttggttcatgtcctgtaaaggtagccacttgtgtgctgtccttcagaagttgacaccatcatccagagagcattattggctggtgggtccatggtaggctctcccgaggctgaagctctgccctgcaactcgggggacgctgcaggactgctgcagcaggtagtattgcttgtgtgaggctggatggaggtcatcagagctcacgctgttgccctccctgccgagacagtggtcaaggtccttgagcctaagtgggagcgacacttccacttcctgaggccattcacattgtcgtccttgatttcccaaaacctcacccttctcctgaggaaaagcagcttgctttaatttctgccgcaggactgagtgcaattggcttcaattgttttagaagtcgtcctgcctcagagccacagtactgctatggtaatacttgtgtataatgtagggttactaccttctgctttggtgctgtttgtttctttatctgtttttgtcaaagggcagtagtggtgatttatgtatcttgtagcttactttgctctgtcttggttggcaggtgttgtagttgtgtgtctgatatgtaaaaatgtatttatacagacacttacatatgtaatagttcccagctggatctcagattctcttctgagttttggctttatccatttatgtcacctttcttactgcttgagttctgacatttaaaatacgtgagtctgagtggttacaggcgtgagcatgtgtcatgttgcattgggctccaggcacatcttttgggagtccgttttctctttctattgtaggttttgtggctctgactcaggttgtcaggcctgcacttttctctcctaagccatctggctggccccaagactttcttcgagaatgctttagaactttgaaagtgcagtgagatgtcctgaacacaaagaaggtgcccaatgctgctatgaggagaaatagtcatcttgtctgggttgtgtttttttaaagtacaccttgtttcctcccgagttctttaagggcccctgagtctttgttttggtagctaaatgttgaaaacattcttcacattggcacacgggcacttctgtaatggcccacgtaaagcagggtttatggatggactcagtttccccatttgttggattcagaaacattccagaggtgtttctcaaataagatgttttattgtcaccatttagtgtctgagcacaccatttttatagtgaaaatggtgccagacatttggcttgagcttttcatagatggtagaggaagaacaggaagtctggcgatgatggtaactcatcagagccaggcttcctgtccagacactgctggagacagaccagcgcctaggcctcacatgtcacctgagagcagccagaagtcttaactcttgccctagtatggatgtctcttcgttcacagtgcctttttcttacagtttaactgaccctttctgattctccagcttgatgacactgtagacatcgaaaaactgaactcacatgacttgttcctcaaccatctctctctctcctttgtccctcccagtgttggtgtccctgtgcatccatccgttgtattagagttaataatgcactttactaaactgtaagtcctgctaaaatcagtctcttgtgtttctttttctagaaaccctccgctttacacagttcatttttagtctttatgagtgaaatgtaaatgctggaaagtgagttaaaataaccctgtaattgaaggctcaaatgcttgtgttgactgcatcctgactttttggtcttctgtttgcttctttctgcatttttagacaccttcaggatagttgggttgccaagtgtttgtctttagtcagtgtccccaagatctagtccatggcagcctacctttgaatttccagcagctcttaccaggtcttgcataatcccaaagtcctttctattcctgcctataagactgaggacggtgagacagcacagctatgggagaattctgggcagtcccctctgcttcaggagttcagaaaggcttaagaacttggaggttctgtcttatttctggttcctagtgagcatagaacacaatccataggcttaaatcagtaaccgtggagatggttttaatctaggttgtaactgatataaaaatggtgcctgattaatgtctctgtttgcttttgcctttgaaggtgtgttcagtcttggtgttcctgtagatgccctcttctttattgggaaccagttggtggccacgagtcacacagggaaagtgggagtgtggaatgcagtcactcaacattggcaggttagtctgaattaatgctcattatagaagtgaccacagtttcatgctcaaggttggtcaaaccaaggtaacaaggaagctctgggaaggcagggagagatacagggacgccaggggcctggagggaacgtatgtggattgataaaggaaaggactgggaagaacgtggtggtggtgtgcggttggtgtattcctcgccgtccttggcgggcagcctgtttagtctcttgttgagctgacttgaaaatgcagccagctttctactcccctggattttacatccataggttcggccagctggattgagagcattccaaaacagaattggcattttcctaattattgtccctaaacactacagatcccagcggattgaatagcattcgtattagaaagtgctagggagtcaagagaagatggagtgagtggatgtgacctgcaaatactacgtcttgttatatttgtgcattcagggctttggtatgttgcaggtcttggaatgaacccagcatgtagtggtgaaagcgagccctaggggcatctgtgtgggcatgcaggcattggggatagaaaatagcaaacagttcagctgagacagatgacaagatactctgcagaggggaagagtgggctccagggatgggacaatgattggcacgaggttctggaggaacatcctgagaccttaggactgaggaatgggagctggtgacagtggacgagtctcagttaaggggaaccttagtgtggggagaaggtttgaatttcagtgcagaggcagaaatcggggttgcatagacggggtaacgagtggagcaaaggcattgcagtggttgtcagtgtgacaggaacaggccggggaacatggagacacactgacacgggtggaggggaggggagctggcaggctcttctgctgctggtgcctccctgcgagagagagtgaggtagggagctgcactgtgtcagctgtgctacagcagagccacgtggtccacgcatggaagcgctgtcccgtgaccctgacaggagcgctcctttaccgccttctggcctctcactgttgtcagaaatatgcataaaggtttttgtagctctgagatccagactcaagctggtcacgtcttgctgatcttagccttgggtgttttgtctgtcacccagttctttgtgcctggtgcatgtgtggctgaaaaatatatctgacataaggatttgttgcacatttcagaaagaccctggcaaagttgtcttccccatagcaaacgagctttatcaaccagctggatttcacctagtgtgtcttggagatgatctgttgtgtggcctcagcctcctgtctgcagatgttaatagacagctctgactagaggctggctcccaggactgccagcactagatgacaaggttctgaggtggccttgagcaacattctggccacaaatagcagaggaagtgcacagggcaaccctgagttcttggctttaaatgtccatggatttgaaatattagtcactaagcttcacatctgcattttatcttagaaaacattgtaaacttcatagttttctgtcagcatctcaaccctgccttaataaaacgctgatgaaatgttctaaaaaccattctagtcgagataagaaattggggccttattcctcattccctgttagtttaatctctcccttctcctgcagcacagcacacacatgtagcatgatgtcacaaagggttagtgttatagtgtgttcattagtgttgtcagataggtggctcagcctaagcaccctgcagagagcagcaccctgtaggcatcattcccaagtttttggagtttaaattagactcaaagacagatttaaacaaagattgattacatgcttaattctcatatcagaacacggaaaatcctgtggatatttgtgctggacagcaactgtggggtatatatacttagcctcttaaaagatggagagtggccggtggttggtggcgcacgcctttaatcccagcacttgggaggcagaggcaggcggatctctgtgagttcgaggccagcctggtctctagagcgagtgccaggataggctccaaagagagaaaccctgtctcgaaaaaacctaaaaaaaaaaaaaaatggagagtgtttcatgtgttcattgtgaggggtggggactcacagttacagttgcttcagtggtgactcaacagtggagatttgaggacgagacactgaccccagcaaggatccagagtgaactcctggtggctttatagagtaggctggacctggggaggggtggggagaggtggggagggggccatcttcctgcagaccagctgacagcattttcctgaggtgagccttgctctaggccgctaccaatctcaacaaaaagtggctccaaagggtggagtccggggctgacccgtctgcttcctgccatagaaacccaggtgtaggtgtggaaggtgcagtgctgaggctggagagatgccgccagctagagccagggcatgggagagaggaggcgaagctccctttcctctgacagccttacttccagctcaggagcacgggtagtgtcaggctatgtggggtgctccatgctctccgagaggactgaccctgattgaggtgagatgctggtgttgtctgcaagacttcctagtgcagcttgtgactagaactgaaaacatgcgctcagagcagaggtccctacgtgcaaacagcttagaggaagccttcactccaggtgcctgttgtgtagctggagtggcctctgctctgcctgctcttcgtgttctggaagacgcttctcttggtgtggactgatggagtcccactctctagttcctctcctgaccactgccaccccctcccattcccttccctcccctccccttttctcctctcctctgtggttacactacacaccttgcctctgcctgacaccagaattatctgatagttttccctctctgtcggagtgcatgcttccttagatgggctgtagcacgaacataccgtgcacacatgaagaggactccatagacctccttgctgggaaacaagaagggctggatcctcagtgcagagttaatggccaggcgtctgtcttggcctcctgagctcacgactccacaacatggagccacactctcttgcctgcaatagacatttagtcctgtgcctgaagctgccgctctttggtttcctggttttacttttcgtggtaacttcactcctttggatttagttacttgttcgcaaagtagactgatggctttgaggaggcgctgtttagttgtagcgcctggaaagcgagtcacccgggaagccgcctcggtaaggacagtataaacaggacactgtccgcttgaagagactgtaacaggttgtctggcggctgcactgtgaacgtcacttgtgctgctctccagctctgattacgcaccacgtggctgcagcacttcatcttatctgagggagatgggagggaagcgtgaagtttgccttggccttccacttctgggggctgtggtgcagctgatggcagacaggaggaacatgtgaagcagctgacctgggagagcacgggctgtgtgtgtgggatgcagctaacatgtgtcttcacagccatctgggtgcttcccgggtcactggggctgacagacagctcattacctaagccttcctaaacacccaaagactcacaaaagtgtggaaagtggcaccaggacccatcccagtggcatgtactggccttttggataccttcctcagcttcgatacagggggaatggcttggtcctgcctcagcctggcacatcagactttgttgactccccaaggaaggccttacccgctatgaggagtagatggagggggggaactggggttaatatcgaaaatgaaaactaaatgtttttaaataagaaaggatacttcctaacttgtaatactgtctccgcatcaggtgcaggatgttgttccaataaccagttacgacactgcgggctccttccttctcctgggatgcaacaatggatcgatatattacataggtgagtgtccagcgtgctttatacctgaggacatggagacctcgccccctgtggctctgagtgcatgtgttcttgtcttcagacatgcagaagttcccattacggatgaaggataatgacctccttgtcactgaactctatcacgacccctcgaatgacgccatcactgcgctgagtgtttacctcacccccaaaacaagtcagtacacggccagccttggggctattgacgagtttactgttctagaagatgccttgtaatgaaggagtgccgagaaatactagcatgttaacgtgtgcctggggacagactgtgtgcttgaatgcgatgcttgtgcacggcatcattttcctgaattcattagacaagacagtcatctgcactaccgggtgatagtgctaaagtggctgaaggcttagtcagtttaaatcgtactttctagactggggaccgcaaaacctcgggttgttactcatgctagccctgtctcttcctccctcttctctcccctccctccctgttttcttttttcagtagttctgtgcactgtccttggctgctttcactgatagagctgagaggttgtgacacagtgtggaaaggagaatttaaaacacttaattactgcttgtccctttagagaaagcttgctgagctctgctctgggatgaacagaatgaagtatggattcccacccagtctaacatacagtaagaggtcaaacttggaaagttctagaaatccaagtccctcctgtggacaagcttaggaagcatgagaatggcgtctctgatctgctggagtgtccctggagtgtcccgatgtgttctgtgctctctccctttgactggtgggtttttcaggtgggtggaagtgaagcccacagttttccacctgtgaatcgtgttagaatacagagcagcaagtaagcgcctgtctgccttctgatgtgtgctgggatatggcacctgttagaaaagaaaagaaaagctaccagggcaggagcgccttgttgctcttccagaggactgaggttttgtccctggaactaagacggcagatcacactgcctatgactctggttccaggagagctgacactgtcttgtggctgcagaggtaccaggcatgtatgcagctgatacacagatatgcatgcaggcaaagcagccatacacataaaataaaaacaagccttttgaaacagggaggagagaaaaagaaatgcagacctacagctgaggcagctggattggaggaggcatcatggctgtcagtgtggttgagcatggcaggtggcttgcctgtccacttagtggtgttggcaattgtttgtgtaggtgacacctggctcaaggatggctcagtactgtagcagcagtaaaaagcccagaccactccgagctgttagtccacggaaggctgctgtggggtgctcttccactggtcacctggaacagcagggtcattcatattctaaatcgtactgagggagtactatgtctcggccattctgagggctgcttcagtttgtcagcaaggagcagaggtttctagtacctacctacgtacatcgctctgactccagctctgcctgtgtcaccacagcgaggcttccaaggacagctttccttaaccatcatacaacaacctgcctttgcactgtggctcctaggtgtcagcggaaactggattgagatagcgtacggtacaagctctggagccgtgagagtgattgtgcagcacccagagacagtcgggtcagggccgcagctgttccagaccttcacagtccaccgaagccctgttacaaagatcatgctgtccgagaagcacctggtgtcaggtacagtaggactcctgggacgcctcgtgttacctgttttcttttgtgcagatagaggaagaggagtggtttatgctgggcctttataactggaggggtgtggctttgagttggcctggatgtactgctcgtaaacttaggaaataccatgtctctgctcattctctggtatttccttcttatggcaaatttcctctcaagatgcgtatcaaatcactgctgaggagacttctggttatcttcagttttaagctaaagttgtaaccttagatgtatattttgatagttgattaccttgtaaaatgttaaaaattcataacaatatgtaaaattatttgaagtaacattttgggggtttatagttccctataatcacaactttaaatatttaggtaatgtagtaaacaagatattgctaattttatagcttcatgaggccactttttaacaaaataaaattccattgaagaaatacatgtgaggaattcctgcatgattcccagatttggtgaaatttcagctctgagttgtctgcagccttgctcttggggagcctgtcctctctgtagcctgccctctatggagggatcattttcatatgttgactgcgtctgtttgaacaattctaagagattttgggtccattgctgttttccctgagttctgggcagagctatcccccaagtgaggccatagcttaacttctgtcaggcacctcactggtccacagatgctattagctcctgtatgctcttaagaagcagcgctcaccagacactatccagtcctgttctcacttctgttgctggtcccttgtttgtctgagagtgcttttttaggctctgttctttgtatgttctctggtgatctgactgctcatcgataccatacatgctagtcccactctgacttttactctccgtcactacatagagaattgaaaacttctctgtcctgtttctgtgtctcacatattatgttcaacaggcatcccaaatcaagcctgaacaaagtaaaggttcttatgatagagatccaagaagacaccataatgtacagcatcaccatctaagtacttcactcaaaatttaagggttcccctgggctcccccttgcttttaacctgaatgaacccaatccagcagtaagtagttctggctgccatgtgtgttgcagaactgatctctcccattggctcaccatagtggctcaagtcattttcccctgggttactgcagctgctggctagttcatcccaggccctgtagcaatacagtctagatctgagttccgctggccttcctagtctatttagaataaatgtgaacttcagatgttctgtgtagcgtgtactatagatttgtttatgttctaatttttgtcctagtgccaatctactttctttggatcatgagactcttaagctattggcttttctattttgtgaaaatgccttagactttcttgcccttattttgtttgacatgtttaggttttcacaacttgtttggttgtaccatcttccagactctctcacacttcctccctgtttctccctgtccctcagactctcacacttcctccctgtccttcagactcttacacttcctccctgtccttcagactctctcacacttcctccctgtcactcagactctctcacacttcctccctgtccttcagactctctcacacttcctccctgtccctcagactctctctcacacttcctccctgtccttcagactctctcacacttcctccctgtccctcagactctctctcacacttcctccctgtccttcagactctctcatacttcctccctgtccctcagactctctctcacttcctccctgtccctcagactctctcacacttcctccctgtccctcagactctctcacacttcctccctgtccctcagactctctcacacttcctccctgtccctcagactctcacacttcctccctgtccctcagactctctcacacttcctccctgtccctcagactctctcacacttcctccctgtccctcagactctctcacacttccttcctgtccctcagactctctcacacttcctccctgtccctcagactctctcacacttcctccctgtccctcagactctctctcacacttcctccctgtccctcagactctctctcacttcctccctgtccctcagactctctctcacacttcctccctgtccctcagactctctcacacttcctccctgtccctcagactctcacacacttcctccctgtccctcagactctcacacacttcctccctgtccctcagactctctctcacttcctccctgtccctcagactctctctcacttcctccctgtccttcagactctctctcacttcctccctgtccttcagactctctctcacttcctctctgtccttcagactctctctcacttcctccctgtccttcagactctctctcacttcctccctgtccttcagactctctctcacttcctccctgtccttcagactctctcacacttcctccctgtccttcagactctctcacacttcctctctgtccttcagactctctctctcacttcctccctgtccttcagactctctcacacttcctccctgtccttcagactctctcacacttcctctctgtccttcagactctctcacacttcctccctgtccctcagactctcacacacttcctccctgtccctcagactctctctcacttcctccctgtccttcagactctctctcacttcctccctgtccttcagactctctctcacttcctctctgtccttcagactctctctcacttcctccctgtccttcagactctctctcacttcctctctgtccttcagactctctctcacttcctccctgtccttcagactctctctcacttcctccctgtccttcagactctctctcacttcctccctgtccttcagactctctcacacttcctccctgtccttcagactctctcacacttcctccctgtccttcagactctctcacacttcctccctgtccttcagactctctcacacttcctccctgtccctcagactctctcacacttcctccctgtccctcagactctctctcacacttcctccctgtccttcagactctctcacacttcctccctgtccctcagactctctctcacttcctccctgtccctcagactctctcatacttcctccctgtccctcagactctctcatacttcctccctgtccctcagactctctcacacttcctccctgtccctcagactctctcacacttcctccctgtccctcagactctctcacacttcctccctgtccttcagactctctcacacttcctccctgtccctcagactctctcacacttcctccctgtccctcagactctctcacacttcctccctgtccctcagactctctcacacttcctccctgtccctcagactctctctctcacttcctccctgtccctcagactctctctcacacttcctccctgtccctcagactctctctcacacttcctccctgtctctcagactctctcacacttcctccctgtccctcagactctctctctcacttcctccctgtccctcagactctctctcacacttcctccctgtccctcagactctctctcacacttcctccctgtccctcagactctctcacacttcctccctgtccctcagactctctcacacttcctccctgtccctcagactctcacacacttcctccctgtccctcagactctctcacacttcctccctgtccttcagactctctcacacttcctccctgtccttcagactctctctcacttcctccctgtccttcagactctctctcacttcctccctgtccttcagactctctctcacttcctccctgtccctcagactctctctcacttcctctctgtccttcagactctctctcacttcctccctgtccttcagactctctctcacttcctccctgtccttcagactctctctcacttcctccctgtccttcagactctctctcacacttcctctctgtccttcagactctctcacacttcctccctgtccttcagactctcacacacttcctccctgtccttcagactctctcacacttcctccctgtccttcagactctctcacacacttcctccctgtccctcagactctctcacacttcctccctgtccctcagactctctcacacttcctctctgtccttcagactctctcacacttcctctctgtccttcagactctctctcacacttcctccctgtccttcagactctctcacacttcctctctgtccttcagactctctctcacacttcctccctgtccttcagactctctcacacttcctctctgtccttcaggctctcacacttcctcagtaaggtttcctagtccatgtaaaactaaccttgtttgcttgagtctcctgagtgtccttcacaggcttacggtgtgattgttacttgtttgcctatagtctctctcctctacagctgcagtagttgtcttctcctctctcttctcagcacttacgtgtagctcttcacacaaaggtgctggaaatgctgtatacagtatgatcttatggcatttaatctcttagctgtgccatgctggttaaacagcagtactttgagatcttcgtgactgtctttggtggctatgttagtgtagagtgtgatgccaaaacagtgcctaaagtaattgatatttcaacatagaaagctacatgtaggtctggataagcaagtttgtcaagaaaaacctcagtttaagcacatgtctggagtgttctgtgttcttagcccttctgccctctggtggctactggcgtaaatgcagtgtgtgctcctgtagttcactagagtctgacaggaggcttcacaggctggtgtaggaacacagttctgctcggacacttgagtcagtcatccaggatcgctccagttatttgtcttttcagtcccactaaatgtggcgaagccaggggtatttcccatgaggctggtaaacaccactctttgcctcctgtacttccctacaggcttggagaacggagcgtttgtttccttacaactgatgtgtgcagagcggttagtattttgttcccagagtgctttgtaactttttctttaaagcacaaaactgctagaacaatctttacattcctagcatctacggatattctttaaaaccattacaaatgggaagttagggttttgttttcttgttaaaccaagctaaaaagaacttcctacttgaatgctctcatgttagtgtctgaatgttcgtcaccagtgtccagccactcccggcgcaggctagttagtgtctgagtgacataaaacctttctctaatttaaaatcttttctacatttgtgtcttaccagcttttgccttggttttattgtttgttttcagtgcagccttgccagcctgcactgactgtgactggcctggtgcctgcctgcacgccggctcccgctgctttacaggacctcatggacttactcaaatgccttcaggctgcacagagagaatctctcccaaaataaaactttgttattactgtcaggcttatttattggtcttgtgtgcatgcgagtatatgtttttacacatgccacagcccgtgtgtacaggtcagaggccaccttgcagcagtcatttcacatggtcacctttgaccatgtgggttccagagacagaactcgggccaccaggcttggtggcaatgtctacctgccaagttatcttcctggccccagttctctcgctctggttaacaagacacaattgagttcagttttaagatgaatatgccatctgccttttagggtgtactgtgatctgcttcatgaaagtgtttcagagtggcgtggtgacactctgtgttctttcctagtgtgtgccgacaacaaccatgtccgaacgtggacagtgacacggttcagaggaatgatctccactcagccaggctccacccctttagcgtcattcaagatcctgtccttggaggagacggaaagccatggcagctattcctctggaaatgacataggtaggcatctgcagagagggagatcaaggacttgggggatcatgggaattatacatgttaatctaattaagatataaacgctgtgtgtgtgtgtgtgtgtgtgtgtgtgtgtgtgtgtgtgtgtgtgtgtgcgcgcgtgcgcgagcaggccgtaagataacttcagagtggggtgtgggtgtgggtgtaggacaacctcagaatgatgctgacatgacacagggtctttactggcctggctttcaccaggtagtctagactagctggccaatgagctccaagggtctgcctgtctctgcctctccagtgtggattacactctctctctctctctctctctctctctctctctctctctctctctcactctggcatgacttctttgctgtggactctaggccttgagcacaggtctgtgtgcctcactgatgcagccatcttccaaccctgtagttttctttctagttctgtgaattcacaaaattatatcattgaaacattttttgttatttaaaaagttcagataaacaattttctcttcctggcatttcctcctttaaatgtggttctctcccagtgctaaccagctagttttgtttgtaactacagctgggattgattgctgtgcatgattgaaactttacatttttttccttttgtttttaacagttattgagagtaaaattgaagctgggaaaagagtcggtgttgttaaggaattggagttgtttggccagcatgtacagatcgctgtactctgctcccagcaaaggggggtgtggttagcctggttgtcagggtgtgcaccgatcatgtgtaaactggggacaatgatgatgctttccttaggtagcacctaggaggctagtgatgaaggtgccactgtttttatgtgagcggtgtgagctgaaggctggagatgtaactgggtgtcaacaacagcagagagcttgttacatggagtgtgctgtgtgccacatagcttttgtgaagagcttctgttaatgagtgcaataaagaagaattattaaactccccagtttctcaagctaggatttcttttatagttggctcagtcttcccggccttgcccagtataatagatgggaaaaaattgagtcattttttttaaaggatgtgtttttttaatatatatgactgtttgcgtacgtatttctgtacagtatgttggatgacagaagagcgcagctgttcccccgccaggaactagggtttcatatggttgtggagccaccatgtggacactgggtgctgctgcaagagcagcaagcgcttttgaacttctgagccatctctccaggcagtctttcagtattatattaaaaacctttgagtgcagccctaaatggactgagtgtccatagtccagaagtccacataccagtcacctaaaactctttgagccccatgtgaaaagtggaaaattctgcactgtgaaacttggttccctttgtcctgttagatctttgtttagactgatgtcctcaaggtgtctcattgtggatgtgaaaattacaaaagtcaaaatactccaaactgaagaattggtcatcgggagctctggacggtgcgctgctatgcaccccggttcagtggcatgcaaagttatttctttttactctgtgtcttaagaaaatggaaacattgaaggaacagtgtggttgatggaggcttctgattacttaaattcttttaacaacatttggtgtgcatctgtgtgcactgtatgcttgtgcccgcttgcctatcacaaagtggaggtcagagaataagttgctggagtcagttctctcctgctatgtgggtgctgggaatcatactcaggtcatcaagcttggtgacaagtgcctttaactgctgagacatctcaccagccccagtatgttctatttattgaagttaatcttcagaagatgttcaattttgcatgcaggttttcaaaacattagtagggattatatggagtgacttagtttatatcttctcttgccgagtttggaactagggatcgagtccatactcccaagccattttctacgttgttagaatgtaagcacattttcaaagggactgtctggtattgtgggtccttgaggagtgaccccctcagcttgtaagtctctaatgcataaaatacaatggtgccgcaatgtggaactgaagagaaggcttctcagttgaggggacgccctgctcttccagaagacataagcatgcacacagggcggcagctccttggggtcctctcctggcctctgtgggcttatacccacatgtgactaacatacttgtacccacactaacatacagacacatactcacgcacaccaacacagtcacacatattcacacactcatggatacacttgcacacacagagagaaacactttttaaaaaatattgtgtatttctattgtaaaatttaatgcggattgacatacttttgctattttgcttgtaatggcaataatttagtgcctgacagtagtttgggcagaggattgttagtgtgcttttataaatgaaaccatttctcatccttgtttgacctttctgttttctgacacagggccttttggagaacgagatgatcaacaagtgtttatccagaaagttgttcccatcactaacaagctgtttgtcaggctgtcgtcaactggaaaaaggtaacacttcacagaaggatatgtatcttcagaaattgcttttgactcccagcatgcaggtgcagtttgttagagctggaagaaacctttgagttgaagcatttcccaacatgcacaaacggcatatacactactcgtgtctctcagatgagttgttagaggtcaagaccatctctacctagaacaaaagtaaggtcatccttggcggatgatcatgtgacccgtgtgactgccatagctcccgattagctgtcatgtctcagttcacatttgtcctcactcttcctggaatggcctgtctccctgggtcctgtgcttgtatggcagggtcaccactctggtcctgaggctgctggcaatttcttttctgcctttgtcttcggagatgaccttttgtctaattttaatggtgatcacagtggatttcaaggcagacagatgtactaagtcctaatacgacccttgattagctatgtaaattcagcttatgtgacctcattggttgtctgactgattaggttccattgtctgcagggtgtgccttatggtaaagtgtcacaaacaggaacagaagtcattgcagtcactgactccatgaacattgtagtaatgagctcttctgtcattctgtttcacttcgaataccattgtccctggttttgctgtttgttttctgcctgccagacaagtgagcaagcaaaattcctagtagttgttaagcagacagggctttcctttcagtgttgctggtgctgctgatgtttctaaagtctctgattgcctgtctttggcatgtctctgctacatggcgttttccagagataaactctgagattgggtaggctttattttcatcaagattgcatgtagtcattagtaattaatgactgaattctagaaaatgactaatgtgtctaaaccaccccacagattgtgtgtgtattcttagaaaatgaattcaggtcaggcagtggtggcgcacgcctttaatcccagcactcgggagtctgaggcaggcggatctctgtgagtttaaggccagcctggtctatagagagagtgccaggataggctccaaagctgcacggagaaaccctgtctcaaaaaaactgaaaagaaaagaaaatgaatttgatcagagggaaactatagtaacagaacaggcggaagttgcttcatagaattgagttatcattgtgaagaaacttactgaccattccgggccctggaagtggagaagagtagaaagtgactaggtcagaagctatcctatagagaagtaaggacttcatctcatggcgggagaccatggcaaaaccacatttgttcttgtgcatatagtaacattgatttattgtattttaaaaatatatcataaacagatatttttaaatttttaagtcactttacaaatataaataaacatcaatcatcacatgaataataatgggaaggattgttctgatcatgacaaacaataaaaattgataaatccatagccatcttaggttcttgcagtactaggcctgagtgtgggagatggcgctgcctttgcagagctgggctgtttccagcgtccctggtgggcagctcagccatccgtatgtaactctagttgcagggagttccttttctgccctcgtggggcaccagacatgcacacaggcactcacacgtacatgtaaaattaagctgttttcaaagttctaacaattgaaatgaaggagaagtcacctaatctgctaatgtctttaacggtggctataagcggatacgaacgtgactcacaaatatgtaaccagatcaggcatattccctaataaatataccctaatcctacttacagagcacctagctgcagtaagcagtgaagacgatgaaggttccctaaccttcaccctgacatcaccttgaccacaccctggggcatggtcacctgtagccagcccctaggaggcttggttatggtgccccctataggtggccagagaagcccttacacctggggaaatagtcatgtgtaccccagctgggccactctagtgtgtgtggcctgtgtggcccacaggactggctgctccattggccctgcccactgggcttcatctgcctccccatggcatgggcgtggcaggtgcttgcccagccggctgtgcctgttttgctgctgagctgcttctcccataaggagttctggagcttgtatgggtttaccttgtaaaagttgtatataaactttagtggttttctttttcaacatcggtgtattttatttcttatccccctttctttttctttgtttcctcacatcttccttctgaagacttcctcattcccaagatagcttttgtgactaaatcatatctatctttgagctgagaacacactataatgtccaagaagtttttctcattcagaaaaacaagacttgaatttctgtcaactctctttgaccattttaaaactattttttgatacatgttcatttgcgtgactctaaaaataagaactcaatgaattatacagtcatcaactatccaatgtatgtcattgatccttgggtctacaagcatcccgtctttgcaggatatgtgagatccaggctgttgactgcaccactatatcgtcgttcaccgtgagagagtgtgagggctccagcaggatgggttctcggccgaggcgctatttgttcacaggccacacaaatggcagcatccaaatgtgggatctgaccacggctatggatatggtcaacaagagtgaggacaagggtaggtcaccacacagtaggatgtttgtcacaagctgacctttgaccttgtattttaatgaatgcttttctcctaagatgccggtggccccactgaggaagagctgctcaagctgttagaccagtgtgacctgagcacatcgcgctgtgccacccccaacatcagtcctgccgcgtctgtgcttcagcacagccgcctccgagagtcaaactccaggtgggtgagagtagccagtacatcgtaaagggacttgatgctcgctcggggagagtgatgctgtgagcagagcacagtttgaagtcagattcattgatactgaattgtttaagtatgaatacacttttatttgcatggtacattcttttcacaggaaaatattttaaacttttattgacttttttctctgacagttttgtacatgtataaagtgcaagggaagaaaatgttgtcgtcttcagtgtatgtggcgtgtactgtgattgacccctggacttcatacatgcctaccatggtcttgaccgctgagtctgacccttacttgcctctgccttttaactttaattttctttggaagcatggcagcaggcagcagccatggtggctggagcaggaggctgaaggctcacgtcctgaaccacagcacaaggcagagagaatgtactggaaatggtgcatggctttcaattcccaaagcctggccctagtgacgcacttcccccagcaagaccacaccccctaagccttcacagacagcatcaccagctgggcactaagtgttcaaatgcctgagactgtggcacatttattgttctgaccgctgtaggaaatgacttgtagctggaataggaatgctattgtgtgatcaggaactcactgggttaggattccctagtcactgaacgaatctgtgtgtgtgtgtgtgtgtgtgtgtgtgtgtgtgtgtgtgtagatatagatacatgatctctctctataagggaatttattggaatgacttacaggctgcagtccaacaatgacttatctgtgaacggaaagcccaggaatctagtggttgctcagtacaaggctgggtgtctcagctggtcttctgtatgtgttggaatcccaaaggagacggctccagtgccagtgagggaatggatgtgctgacaaagagaaggcaggcaggcaaagaacaagcccttcctgcttccattgtccttatctaggctcccagcagaaagtgtggcccaggttcaaggtgtgccttcccctgcaagatctgcatcacaagcgtgccctccatctctagttcatcctagatagagtcgagttgacagccaagaatagccatcatgcttacctgaattagaaagatcagatatcaactggatatgttgtggcggttttgttcttattgctcaggttcagtactaatcaaaagtggttatcttgtcgaatttcatataaggtattgtgtactttatcagatactttgccattttcaaccatatgaaaaaaactttccaattctgagaatccaagggccaaatattgaattacattaattccttattggctttagattctattttcctttttcccctgctattcagaacacttgcttgattgtgaatgtatgtgtatagtattaagcaatttgtaatacgggcagcttgacaaatacatccttatacaggtatggatagtaatgtgccttccgtgtttttatgatgttttagttggcagttttaactgctgagatacgctcctgagaccttgaagcgaactcacaacttgtcatttttaaatctgtcttccagccttcagctccagcatcatgagaccatccatgaggcagctacttatggtgccacgcggccttaccgagagagccctttgttagctagagcaaggaggactgagagtttccacagttacagggacttccagactcttaatctcaacagaaacatagacagagtccttccagaaaatggtcacatgggtccaacgcaggctgaagtgaaaggggcagcgggggaatgcactatgtctgagaggaagtcccctgggacagagctcagatgtgtgaaagaattggatggtgggttagaagtccagaaaacagccgacgggttgtcagagtccaagaaaagatcctcagaggatgagatcgagcagaaagtggagttccgcaagaaagggtttgaagcaggaggattcctcggaagaaagaaggttccccacctggcatcctcaccaagtacctctgatggagggaccgactctcctggtacggcatccccgtctccaactaagaccactccgtcacctcggcacaaaaaaagtgattcctcgggccaagagtacagcttgtgaactcaccacagtgcacaataattttgatagatttacatgaagaacaaaattgcctgggttttagtaaattggcttttacatcaaaactttataagatacagcttgacctggttcatgttttctgggccgactctcctgaggcaggagcagagcacactcttccaagggggtgcagtggtgtgtccctcgacggtgcacgtgaccctacccctgcgggcacatggggtcttcccgtgttgccacccctcctgtttgtcgtcccagcgcccttagagcatgtgaggcaatgagtgggcccttttcccagggcagttgcccagggcttgtcttgcagaggtacttagcagtaagactctccccagaatgtggctcccaacccttgtgattgccaagtgtttacctgatgcctgatgaggtgctatgttgtgacagtctcatggaactcaaaacactattattggaccccaggttccactgtgcactacatctttagggtttttttatttcattgtggtcattttctcatccttgttgttggtgataatgcagcatgcatcaccagtgtctgaagcctgaagtctccgtgctggacgaggtaaaatgttagcaagaggggagcgcgggctgtccagaagggcagccttgcatttgctgcctgccgccctgctataggagccactgtgtttctgcagggtctcacaggactggaatggtagatttggagttaaatgtttccacacgtaaaactgtgttctgactttattttaaactctgagggcaaaagaaaagctcttctacattttcttcatctaatctggatggtttacacatttctgcaatggagaaaatgtaaatttaaacccacgagcatttgctagtgaatgatgtgtaattccctctcccagaagtataatgaagttggaaaaattctttaaaattaactatattgtcagtggtttcacaaaaattcccttgtatttatttgtcaattaaatggaatgagaaaggcaggcggtgtgtcttcagttatttagggaacattatcctgtttcagctggacccatgtgtgtggaaaaaagaaacgtcgcatttaccatgtaagaagaccactagagagagggaggtgcttgggactaaaatctcatagaaagatgatgtgaaccttaactccatcctggcaattggaggccagcctgggctatatcaggagcctctgtctcaaaaacatgaagcgtaacttgattaaagcatggattgcagcattttgccattctagccttgtgtcttccgtctacagcagtgctggattccctttgtctagattgctctgcctacgttgccaaggttgactaaaggacaataatgaagcatatctgtatctcatggagaaaacagtgcaagccgttttgttgtaagttcttctactaagtggggtaagtattgttttcatctcacagtgaagtagcagaccacagagggtaaaacttagccagtggctgagccagctttcagactgaggtattctgtttgaaaaacctaggtttcttctgggctttctcattaggattgcctggagttaaatgtagttgccatagtcccattccaaccttggtgaatttgagcgtcaggtagtgggctcactttggcaagggaatcacagttgattttagtgtgctccggaccagaacatgctcggcatactggtttctcaataggtatgcctctgtcattttttatgtgtagctcgggagtgctagaatatgccttgagaagtatgtgaaacgtagttcccattgaaatatctgtttacactgtctttacatgcatcacggctacattgtttacctgccctttgcttttttcactggttgtagtgtttttatgtggatggcagcatgagagcttagagtagcatggcatgctctaacaggtttataagcgcttaggttctttatgtacttagttcacgttgaaggagagttagaggaacacagacaggaaggcaaaaatcttctgagatagtggcttgttcccagaggacaatgggaagagaaatggtgggaaggcataggaagggaggacccaagggacctacaaaatacaacctgcgtttcccttcagcagactccctgactttgggtccctctcaacctgaagggataaagctgttccttttgctttcttggcagctgggtctcctgcctttcctagatgttgaattctttgtccagccctgggaaagtgctcagcgattccctagtcaagaaccagcatcccattacatttcctggggagctcatccaggatttgagatgatatctatgcacatatacctgactgaaaatcaggaggaggcctcggcaggtccccttccctgcaatgggactctccacaccagtactagcaaggtcagaatccccagttagctctcatctccatccagagacggggaagagtgggttggtagactggtgcacttttatcttgtgactgggtggggggttctgctgtccctcctataccaagaagcacaagtgctggaccccaataataatattgataatcactgatcatattcctgatgaataataagggaagaaggctaattcctcactgggtatgcatggagaatgtcacttgagtcatcaaacttttagctgagtgcaggcacctgggcatgggctggctggacaaggagaaatttattgaactttttgttttgtttttttcattttctattatttgatttcatggaacattccaaccacggttcttcctcctatccctcttcctatccccccttgcctcctcccaccctccctcacctccctctaacccacctccagttcactcctcctcacgggtcagggctcctatgaggagtcagttgagtccggttcaataagtttgggcagggcccagcccctctcccatgcaccaagtctgagcatggcatcccaccatagggaatgggctgcgacaagctagctcatgtaccaggtttgtatcgtgtcctactgccagggggggcccttgagccattgtggtacctagtcttgttttccagcagggtagagaaagtggtgccaaccttgttgttcagagagcctattcattagaagaactgaaagaaaaacggggtattgagtttttcaggttgtctgcctctatttgcaaacatccagaaattgattgtggctagaggctaagcagttgcccctcagtctaactgggaagggtctcaggttagaccattggacaaggcagactagctccatcctacttgaccatggctcgctccagtgcctacccagggttttataaagtttaaaggctccagaaggaaaggatgttttctgtatccattcatcctgttccccactgcatgacacagtaggtaacaagactcgtctgaaccagtctctactggttatatggacaggtattttgggtccagccacttgtcagtggactcaacagtacatctgtttattgtaaaccactgtgttggttttatagaaaagcaaatgaatgccttgtgtgtgcactaaattctcctgtgctgttcgagtccccggagaagctggctctggagatgtcagacccaggcatttccggaatcaggctgggcctctggctgtttctccctgccacagaacaaaagagtaaaggcatcatgactccttatctcatgatgaaaataaggcagctaatgaaaacacaaacaacacctcataagtagtcggtctatcaccacagttttatctgctgctcaccgttgctgtgtgctgtaagaagactggttttatgtagggtttatcttggaactcaccaagcttctcggtggagcaatgtgtacacaggcggtattaagttactacagtttggattcaactttcttttattaaggtgctattacacagcactgtgtttgaagtccaacaactaccatggcatcagctaagccaacttgcaaagatcgtcacaggtaagtttgttcatgtcgttaagtgtcacaagaaagctggtaagcgtgggcaagttacagagtctgggcaagttatataaggtatgtaacagagttaatacaccgatatcaaacttctgcttatgtctatggtgttatggatctactcggtagcaattacaaggactgcaaaatctcatctaaacaaagtttaagtgtttggtttaaccccaactttatctacatattactcagttaaaaggccagtgatgtcactctgatacgtgttaagtattcaggaaccatacgtgggagactgatgtggtcagaggatttaaaagggagggtatttcctgttttcccctcaaggtcagctaggtcctagggacctatgaggcgtaactgtagggaatcacctgttgtcttgttgaaggaggctatggagaagctatccagtcagctctcaccagtgttcagtctacagagaggcatgccgacagaggggaaattacgccaccttcccaatgaagccagggtcaagcaagggttttgacctgctctcgcgtagatggaaaaactggtaaaagaaaggccagaggttcctatcaagcctcagtgacctttgaggaccagacactcaactggggtctttacagttaaaaaagaagggattaactttagctgtctgcatggttttaaacacatagcaggcaagtatcaccaaagaataaaatgattgctatgtttccttcacactcccagggatcatagtccctagacattaaaaatgtcctcaggaggtggtgtttagacagtatttctcactaatgatttgttcctgaacagaaaaatgctgcctagatgtaggaccttgtgatcctggtgcaattcaacactataggcacctacctgcagccatgagaggcaggccccctttgctgtaacctaaagactggccagttctgtttccatttcaaaaggtataaaacttggcaagacaggaaaatgcatggtaagatgtggatagccactgtggagtccctgccacttcaggagtgacaagttgtggacgtgtttcattgccatctgtgctttgatacttaatgggtgactaggagctgctgtaccacaagtctggatgacagatcagcaccccgaaaatccagccttagactgttggattgtgggagtaaatagtgtcttttaagtgaaataagtgagttagtccttcataaaggtccacaagatattgtcacataaactcagaagaatttcctggaacttttaagactgaaggaaaggagggtttcttacgttgttttccaggaatagcagattcatattttatgaaaagttgattgacgatctcacaggttttagttcaagctgtaacagcgcaacctgcgtacatgagctttgtccttaggaacagctaggagagctgtgcgcttctgagccatgcctgctctgtaggaagctctgggtagcagcgctacagccttaccatgtgtgtgtgcagagatggttctctgctgcagtgtgggactgtgaccgccagtgcaggtactgcttacaggatttcgtcgtcctcctagtagacttgcttgttttaaactcgtaacttctcattactgataagaagtgtgagccatcttgaaatggcctggattgttcctttgatgtccacaaaatcagcaagacaatgcaagcatttacatgtggctagaattccttattcgagacaaccagagaaataatatctcgtacgtctctattaggaaaaattgaaaattaaaaaaaaaaaattgtttattgtttttcagcttctatggcttgttgtgataactggaaaaaaacagggcccagagcacgcacctcatgttcccatgttataacttccatcctttacaggtgggtgtcggtgaaggtggtgtgttccttggttactgagctgaagcccttgatggcattcattagttcctcttcatccacatactgaaaagcaagccagtcactggttacagtactcactgtctgtcactgtgatataaaacatgctcagtgaattaaacacgagaatgtggtttaaggaacttcctttacattcccttcattgaagggaacacgtgcagacgtgaactgccatctagttgagcacacagctagaatgttacattgtacagtatcttagcccctgtgagcctcggtggatctgtagaggaggggaaatttgaatctgtatatgtagtttttcatttaaaagatttcaatcaaaaagagtaaaagctgggacataagctctgtgccctgtatttatcaacagggttaatgtcgtgatttcataatgaggcggtaacttgccaggtgttggcaccgtcacagggttccactgactccttctgcactctaccctttactaggactgacccccaaggaaacacacatggctgttgttccaagtggttacagggaaagcctatgatcacattcgcacaaaaagatgattcgtgttcttgactaggtcccaggcacctctgaccctacattccttctgtaaccatggaaacagcccttcctagacagcatgaggattatgtgaaatgttctgtctacatcttcattgttacattgagtacatttatgttttgaaaaaaatcatgtagcaattattcaatttaattatccctgccatttaaaagtttgatcttggtacaactcattcaattacaaagtttccattctagatctaacagcattttttgagaaggatttttgttttgtgagtgaggcaaggtctcatgtgtcccaagtggcctcaaacttgacatgttgttaaagatggctttgaacttttgatcctcctggtgctggaattacactgtgcaccactgtgttccgagggattggacccagggcatcaggctggtcgggcaccctgtcacatgagcttcgaccccagccccaggaagacatcatttaacttcagtatctactgaatctttcagaatcagcacaaaggactagggggatggcaggaaaggggatctagagctgagcaattaatccctttgtcattttgccattagtcaggaaggaactcatgggaagtcgccaattttgcagtgaaggaaagtacagaaaacttggaaagcagttggttggaggccgtggacatgaaggaagagctaagctctctgccctacccccccccccccgtttcttctcctcctagctgagtggaagggcactccagtacatgtccaggatgacaaagcaggatcgttggtcggtaaacatcccacagtgttcgtcctctcagccactagggcggttgaagctgacaggagatgacaggtggtctctcaaagccaatcagtgatactagtagaccaagtctatggaagacggagctcataaatggtgactgagggctggaggttcatctcagttggtagagtgcatgcctagcatgcacaaagagccctggtttccacctcagtgctgcgtgcttgtttgtttttaccgggagaacacggaagcacatggctgtaattccagcatttaggaagctgagaaaggagaaacttgctcaaggtcatcctgagttacatataaccttgtctcagtggatgaatgaataacagtatttatcatgactttatgggtttttttttaaagtaaaccaagtgttgcatttatgccttatgagtgttgtaacatggagcatcaacaagcagttcctacctaaccagacagctgtctgttgtcaacataatgggggggtggggtacttcctacacagagtgctcaggaggccatcaactcaccagtccattgctgtggcccaaaatagtttcccagagtgagtcatctgtcaagcccttcttgtctggaatgtccatgagctggctgacactgcggtggagagagccctgggagtaggtctggctgagttggctttgacttgggatccgcagtacagacacactccggctgcttcggatactcaagggtgtcccagactgagggattctggtatcggctaatccctgcaaagaaagctgctgttggagatagacgggtaacagcatggttagcaactggaattcataccttgtgcctgaaagcaatgacattctagagcctcctacaacaggacttgagctctggagctgtgattacctgtaatcctgtgcccttgtttccatgagaaatgtgctgatgctggtgttggtggcagtgctgggtgggggtggggggcagctggcttaaggtgctctctaactacacactggtgtggagcttacctcttgaacttctcttccccttatcaaaagtgaagcgtactgttcatggttgccactaggagcaatacaaatttcattttcagagttctgggctggcctaggaagtgatccctcccttcttctcctcatatttaccttcttgtaggaatctagcgtcctcaaatcatcagctctgtcattatcaccagcaaggcaaaaatctccataattataatctaagctgtgctcttaagggtaattctagctgactgaaaaatccagtttctgatttaacggtcccgttagtggaatatttctgcttctcactggacaattaacacagcatgcaaaataacagatggtatccatgcagcacacacaggtacctcaaagtgcatggtgtaactttttagggtgacattgctggacacatcagatatatcggccacagagtcaaactaagaagaaaaacacaaacaaataggtgcatcagtctttgcttaacgctgcttcaggggttcggagccaagatggccaagaagcacccttcacacagctctaccacagagaagagtttgagccactagtgggaaaccgtttggaggacagaggatgaattgatggaaacctcaaagagctagaacaaccagaagaaggtgacctagagagaagcaatgtgtgacattgtcacccaggtcctggccaggatggagccaatgttgctggcatcatgtaaacaagtaccagtcatgtggaccgtaacagcaaacagacaacccgagtgaatcatccactgtacttacaagtgaaaaatctggtttggggtggtgacagaacactctgctagttcatacagggccttgggttcagtatcagcacaaatttaaaaagagatgtgattcctatgaaccaaggaaggcgctcactctgaaccacccccggaactcaagcaaccataaccgccccttcttgatgacatcttggcatccaaataatagccatcccccatagccttggaccagtatgtacctccacccacctgggcagaagatcgctctcacaagatactggtagctgctgtggctgtgagctcaggaatggggcgggggtctttctataccacagctggactgtaccccctgctgaaaattcttggtctcatccgtgcctacacagctagagctcataaagttccaggaaggcccagcaggcagctctaggaacacaacaccaatcttccactgtgtgtaatctagtagggttcctgtcttagcaactttggaatagcggggacatgccagcttcacctgtgcctgtagctgctaggccttatggcttcaggaacatagtaagtggtggctgtcatctgtcagcacctgtacttggtgagagatctatagacatctctccccccccccacgcacaccaggagttttaagagttctgtatttatggatagaaaaggatgccataggaatccggaaaagagtctgtgtacatcaaatcctgaatggactctaagactattagagacaaattccacaagtgtcagaaccacctgtactgatttgtgaaaccaagtgaaagtttttcatgtgtccttgggagtgggtgtggcagggcacacgtctaaatgaaaatgctatgtactagatgacatcacagcctgtggacttggggccatgcttgccgctgccacgtgtccttgttgccggtcttctgccactgtcattgcctacaggacctaggcaagttcataattgcgtggcctgtagatgccaccaccatcttcaaacatctgtggcacccgcaaaaggccccagcctacatcctgtggctcaagagttaccacagctgtgtcacaatccttggcattacctgtgcttgccctggggaattctgtcctccctgtacccacaccacctagattggtaaccactcaccaatcctgttgttggaactcactccgtgggggcctaaagacacatacccttctatgtctacctcaaaccaagtaagtaccaccatgaacaactgcagtctagactgttagagactatgcttttaagctcctttataaccaaatgtttcaaactgtcatccaatatcacacgaaaaaaacaaacaaaaaaaaaaaaaaaccctttcctataaaaaaaaatggaagaaaaatgtagtaggtacaagtctaaggacataatcatgagaggatgtatgacctagatgaccaattctttttttctttttttttttttgagacagggtttctctgagtatctttggagtctgtcctggaacttgctgtgtagaccaggctagccttgaactcagagatccacatgaaacagtaaagatgatcctagagaagataagtgagacttaagtacaacatgatgagtcaatgtagaaggcgtgtgaggaattccctgagaagtagaaatcagtaaaagagccaatcaggaatcttccatgaacaaaatgagtagtgaagggaactctccacaacagcataggacaagctaaagaaagaactcagaacttggagacaggttactgacactaggacattaagatgaaaatggaccaagaatgagaaacttagaaggcttctagtgacctaatatttgcatttgagaatcacagaaagggggaaaggtactgaaatatttcataaaataatggctgaaaatttcccaagtgctgatgggtggggaggagctctgggcgatactgacttctgggtaagacacagctgttgccaggcaaagttacagcgcatgtcactggttatcagaggaggtattggcagctgatggctgctgagagaggggtgtggccactggcaggtccatgccctagtggaggtactcacatacccatgtaggcagcattagttgtattggggtgttggtattagcaacaaattaaaaaggaaaaaagcatgaagtttggaagatgatttggaggggtgggaattagagggagataatgaatggatatgatcaatatacattgtatcaagacataaacacaataatagattttttaaaaaatccccagagttatggatatcagatttgtgaagctattcctccagaatagaccttaaccatggtatggtttattaaatgttgtgtgtgaccaagaattctcaaaacattaaggggctactctcatctgcagcagaattttcactgaaaacttatagcaagatgagaatgatattacatatttacaatacagactagaaaacatgcttaaaaataatactaagtaaagtttttcccagataagaaggaacttagggaattcttggccaacacttgggaacacagggatttcctaactagaaatgaagggatggtgttaggattcaaacatcacactggcctgccaccttcacctggcagaacgcatgcaggcagtaccctggccatcccagggttctatggatgctacgtgactatatagtctgcatgcaggtacagagggccctttaagaggaaaactccaattcttctctctttcctactgtttctctgaaggggcagacagaacttttcctgttcctccttttctcccgcccttctccactccctttcctttccccaataaaacttcccacttaagttctgcctgcctggcgtgtttgtccctcacctgccatggaatccacaaggtccccctcgtgcagtattataacagctggtaactgctgttatgaaaacaagactgcataagactaattggaaaattacccccaaagatttaaaactagatgctgacaaatacagggaaagcaaaatagttatcaaaatgataggaagttagtttatcaataacatccttgcctataaatgaactaaattcatcaatcaagaaatatagattggcagcattaagacttaattgaaagccagatatagtggtacacacctataatgtaagtacatgggaggcagaggcaggaagattgagttacaagccattttggcatccctggttacaaaaaaaaaagagagaagccacaaaaatcccaagacccaactatatgctgcctacaagaaactcattttattgcttcactataaaaatacaccaagtatactaaaaagtttggggaaagatatgtcacaaaaattatctgggattcatagttcaatctgtaacccctgctaattaggaggctaacacaggagaatcacaaaatcaaggtcagcctgggcagtaagggaaatctcttaaaaccaaaaaatggggttggggaggatagttgtagcttcagtggcctagtgttttcctggtatgtgcaaggtctaaggttccatctgtggtactggaaaacaaaaatagagcaggaatagctgcattaatttcatataaaattggtattaaagtctttttcaaagagaatcagttaaaatgatctgctcaagaagatataagaattataatgatatgtaaatgtcctagtcggaatgagaatggtccccagttgatagaactatttgggaaggattaggaggtgtggccttggtcggaggaggtagtcatttaggggtggattttgaggtttcaaaaagactagccattccaattgtactacccctcccccatagcatggttgttatctccctactgttccagtgccatgcctccctgccatgataaccatgaaactgttaagcaaggccccaattaaatcctttttttcccctataagttgccttgatcatggtgtttcttcacaacatgaagcttcctgatgaaaagcaaatttaggtctaatgtgaaagataagtcaataggagctgggcattttaacatccaagtttcctcactggtacatcatacaaacacaaagccatcagagagctatacgccaaagcaaacattcctgacagctcctgaacatttcatccagcacacagatccctctcatagggatattgaggatggagcagttaacaaatcgagactcaacaaatcacagttctattcagactatgacaaattaaaactacaatctaagaacaacaggggcagtggaaagggagcaaatacatatatgtaaatcgaataacatgctcctaatgaccaaggcgtccacagaaattcaaactcataaaaagctagaaaaactagaagaaatgagtaggtgtttgaacatctccaatatgctccaaagtgaatcaaagtgaacagaaaatctaaacagacccataatcagcaaatgatgttgaaacaataagattctctcaactcggggctggaaagataactcgtctgtgaggagtgttcatggctcttaaagaggaccccagttttgttcccagcaccaggggaatctgacagctttctggcctctgcaggcacctgcactcatatgcacagacatacacacaaacacataaacatatagctaaaatcttttctctaaaatgtctaggatctgatgctttgctgaaagcatacttctcatacttttaaaactattccaaaaatccaaaatgaccaggactcttccaaactaatgaggctaacattaccctgatacccaagccagacaaatggaaaccgacacaatagagtatatggtgctactgtacacagaagtagttgtacacgcatacccccgatggacacagaagcaagcactctaattacatattagtgatcaaaattcaacttgatgcttatatactagtaagacctgaaccaatattccagcaaaggctatcatgcatggtaagatactgatttttaactcctctagattgcctactgaaacagcatttcccttttcacatcaaaaaagaacatatactgttatcagttagaactggtcccaggcatgcaaggatggttcaacatgtacaaatccagaaacgtgacagactgcatcaacagaaggaaggacagaaaccacagggctcatcactttacagaaaaggcatttgatacaattcatgataaaattactaaatcattacacataaaatcatacctccatggaataaagaacatttataataaaagctatcacagacgatactgggtagggggttttctttcttttgaaagaagccagcaatacccatgcttaccactgttagcagtgctcaaaggaagtctttgcaggagcacttaggcaaaagaaaggtttaaaggacatctaaattggaaaggatgagattaatttatctatgtctgcaggtatgattttatgcataaatacttcaccaaaacgtgttaaaatggtagtgagttcatgagcatgtaaagcaggttgcaccaggaggtttcctttccatacataccgcatgggtttcccccggtgggtagacactcagcggggtcgttctcttctgaggaggcactaagggaggtcgctccctgatccatggctgcctgtggatttttctttgtagaatcaaggacagaaaaatggccagcaagatcaggcccagaactgccattaccacaaggaaccacatctccctgtagaactccgtgcctttggtccctgttcccttcttttctcccggagttgtcagcaccaggcctgaaaaacatgggaaagaaagattctttcagtaggtaatctcggcatcctgtggcgcacagtgctgttgtttcatagagaggcaaagtctcgtgtgcttgtttctaactgcatgcaagctagggtgttgcattggagtgagcaagggtagcactgcaggtcaccttacaggggtgaggccagcaggcacagtgctgcaggtcaccatcgccttacaggagtgaggccagcagtcacagtgctgcaaggcaccatcaccttacaggggtgtggacagcagtcacagtgctgcaggtcgtcaccatcaccttacaggggtgaggccagcagtcacagtgcagcaggtcaccatcgctttacaggggtgaggccagcagtcacagtgctgcaaggcaccatcaccttacaggggtgtggacagcagtcacagtgctgcaggtcgtcaccatcaccttacaggggtgaggccagcagtcacagtgctgcaggtcgtcaccatcaccttacaggggtggggtgaggccagcagtcacagtgcagcaggtcaccatctccttacaggggtgaggccagcatctcatagagctgcaggtcaccaccaccttacaggggtgtggacagcagtcacagtgctgcaggtcaccatcgccttacaggggtgagtccagcatctcagagagctgcaggtcaccatccccttacaggggtgaggcatcagtgacagcattgcagctcattatccccttacaggggtgaggccagcagtcacagtgctgcaggtcaccatcaccttacaggggtgaggccagcagtcacagcgctgcaggtcaccatcatcttagacagatgactggtggtcagtaaagtgggttttgagccatcagatcttttcagctgtgaacgtcacagcgcattctgacagtttgcctctggctggttgcctggcctctgttaatcacccaaagctctacaaatcatctcagatacactgggcggggggcaggggggtcctatggagggaagtgtcaggaagacagttcactgcatttgtttatgtgctaaagttggtgtcgtcttctccgccagtcacagttcactttcagtgagggttccagtttacatctgtgtggaatgcttgctccctcggacagcagtgttcagagaagggtcaatgacaggtgactaggccatcaaggctcttgcctcaccagtgggcagatctattggtgggttggtggcttaacgggctgttgagaggtgagggagaccctctgggaagaagcaggtggcttcgggcatggaggtgtccttggcccagacccatttgtctctgcttcgtggttgtcatgaggtgtgaggggaacatccatgctctgtcacatgtgtctcactatggtgctcggcctcagactagagacaatggggcgacgtgaccatggatggaaccctctgaaatggtgagcctaaacagacttctccttcacgctgtttttctcgagtcttctggtgcggtaaaggaagtctgaaaagcaagcagtgctaggattacctcatcttctgcataggggacaggaaggggacataagggaaagagggctgtggggtccctatggaattgtgccagcaggctggctaactgagcgggcgggcgagggtcttagctgagctggctgcccatcatttcaccgagaacagcttagaggctcacaactgtgatgcagccaccagctgagctggcagggatctgacagccaaagccccaccttctgaaagccagcagcagaggataagatggtggcactgaactcgctgctcagggacacctccctgttttcagcagatcaggaccagagggcagggacgacataccagggcctgatgtgcacactaggggagtcacagaaggtgactcaaactaagtttgaaccccgaaaggagggcacacctttgtgaacccaactcttctcgtgatctgtgacatagtttgaaaagtcactgatgtccccggcctctccttctcacttctaaaacacaaagttgaagacaaagctccagcaggttagaagccccttcacagtgacaaccagcatgtggtgtttggaaactgaaccctggctgtgtacaagaaggtgtgtgtgtgtgtgtgtgtgtgtgtgtgtgtgtgtgtgtgtgtgtgtgtgtgtgtgtgtgtgtgtgacagggctaggaccccagagactgatccgattggctatgtgtgctctttgctcaggagtacaccagggatgaagggcagggtgcccgaggggaacctcagagggaaagctcacagcagtaggagacagtttctgcttcttcctctgcttggaggctgccttcaggcaatggaacaggaactctttagaaattaaatcataaaaattaaaactgactagaggtatcagcagggtagcacatccctgaaccaggacagtccacagtgtcttccctctgctctgccaagagctcgcctccagacaagagggcctccctcagcacagtgtctgcagcaggaagttacatttgtgcttaggagctgactggaagttactgccctgtgataaaggctgaaaaagggatcatgcctggccttcccttttcctttcagactgcactgtgactttaagggtccctgccttgctcatcaagtgccagagtcatactcaggatgaattctcctggttggtagctggttacaaagaaccatagctttgttctatagctatggttctttgtatgtttctagcagtcctttctatgttctagcagtcctatagctggtgtcaaatgagtctctccctggtggttggtgtggagtatggcatggtcagcaggtggtgctgggccccagtttcacaatccctggacaggatatactgaaaagacacaaccagctcagtggttaaaagcactggctgtccttccagaggacccaggttcagtccccagcacccatatgacagctcacagtagtctgttattccagttccaggggaaccctcacacagagattcatgcaggcaaaacaccaatgcacgtgaaacaaaaataaataaaataaaaaaacacaatccccattctcctccctcctgtatatgtcagccacctgaggttctgtatagttaacagacacacagctgattcttatgaacatgtatgtaagccggagaaacaaggttgaagaaaatggctggggccaggagttggtagaaagaccgcatttgtgggtgagtaagcagcctcctaagtgtgcagaacattcctgaaaaaatccgtgtcctccactttccaactgggaaactggatttgttgaagatatcaaaccaagtcttttctatctcaaagctctgagtaaaatgagattagctatattggagagatcatgttaagtctgagagatatggtatagccaaatatgtgcagaatggaaataggagagagagagtcagagggagggagggagggagggaaggagggagagacagacagacaaagagagagggggggcacatgcagaggtcagaggacagctttgggcatcactccttgcgctctatctcactggagatagggtctcctgtttgctagctggcctgggagtttctagggtctcttctgtccccacttctcattttgtcttggaagcactgacattacaaactgtactaccctacctggctgtaagtgggctctggagattcaaactcaggtcctcgtggatgtgtgctaagtgccttcctcactgggccacctccttagcccttatgtcatcataactggtgaaggatgtagacagacatgtccccagttcaccatgttaggctctgactccagtgtatcaatcatcttaggctctgactcctgtgtatcattttaatcatttggcccacaaggaagggaattgagcacctactctctcccatctcctcatcctgcctggattctcgctctgctacctttctgcacaggaaaccacaaaattcttcaaaaaaaaaaatacttgttcagaagagaagtttaatcagttctctctgatgtttgccacactgacaacacaatgccttgtcttttgaaaataatactaattccttgtctaaggatgtccactctctccatacctcttcaatattgtccttgaagttctagctagagcaataagacaacaaaaggagatcagggggatacaaactggaaaggaagaagtcaaactttcactatttgcagatgatatgatagtttacataagtgacccaaaaaactctaccagggaactcctacagctgataaacacattcatcaaagtggcaggatacaagattaactaaaaaaaaaaaatctgtagccctattatatatggatgacacattggtggagaaagaaatcaaagaaacatcaccctttacaattgccacaaacaacataaaatatcttgggggtaacactaaccaaaaaagtgaaagacctgtactgtaagtattttgagtctctaaagaaagaaattaaagaagataccagaaaatggaaagatctcccatgctcttggataggcaggatcaacatagtaaaaatggcaatcttgccgaaagcaatctacagattcaatgcaatccccaacacaattcttcactgacctttaaagaacaattctcaactttatatggagaaacaaaagacccaggataaccaaaacaaccctgtacaataaaggaacttctggaggcatcaccatccctgacttcaagctctattacagagctatattcctgaaaacaggttggtattggcacaaaaatagacaggtagactaatggaatagagctgaaaaccctgatattaacccacacacatatgaacatctggtttttgacaatcaatccaaatatatatgctggaacaaagagaacatcttcaacaaatggtgctggcataaccggatgctggcatgtagaagactacagatagacccaagcctttcgccttgcacaaaacttaagtcaaaatggatcaaagacctcaacataaacccagccacactgaacttattagaagataaagtgggaaatacccttgaattaattggtacaggagactgcttcctgaacataacaccagtagcacagacactgagatcaacaattgaccaatgggacctcctgaaactgagaagcttctgtaaggcaaaggacacagtcagcaagacaaaatggcagcccacagactgggaaaagatattcaccaaccccacatctgacagagggctgatctccaaaatatacaaagaactcaagaagctagtctccaaaacaccaaacaatccaattaaaaaggggggtacagaactaaatagacaattctcaatagaggaatctaaaatggctgaaagacacattaagaaagtgttcaacatccttagccatcagggaaatgcaaatcaaaacaactctgagataccatcttattcctgtcagaatggctaaaatcaaaaacaccaatgacggtttatgctggagaggatgtggagaaaggggaacacttctccactgttggtgggagtgccaacttgtacagccactttggaaatcagtatggcaactccccaagaaaatgggaatcagtctaccacaagacccagcaattccactcctaggcacatacacaaaagaagcacattcatacaacaaggacatctgttcaacgatgttcatagcagcactatttgtaatagccagaaactggaagcagcctagatgcccctcaaccaaagaatggatagagaaaatgtggtacatttacacaatggagtactactcattggaaaaaaaatacaaaaaaaaaaaaaaatggaatcttgaaatttgcaggaaagtggatggaactcgaagaaaccattctgagcaaggtaacccaatcacaaaaagacaaatgtgatatatactcactcatatgtggattttagacagagtatgggattaccagcctacaatccacactgccagagaaactagtaaacaaggaggaccctaaaagagacaaactttgtcccctggagaaggggaaagggtcaccatcccctgaacaaattgagagcacaggaagaggggggagggagctacgagaatgagaagggaagaaaaggaagaatgcagaggtcatgagggagcagaaaggttgagtcaggtgtagattagaagaaaggatatgtgatgggtagggttttagttggggggtgataggggaggaagggagggagaagggaactgggattgtcatgtaattcaatcttgtttgtaattcaaataaaaaaaaagaaaataatactaattccttgtctaatagatattccattaggatctgtaaagttttctttctttcttcattttttttttttaattttaatgacacactacagctccttccaaaaaggctaccaggaatgtgttagctgtgactgtatgcagacatctgcctgtctctggggggaaataaatggctgctacactaaacacaagacaagagacatgtttaccaaatccagcagtggcatcatactgcaacaatggagtcttaacacttccaacatctgttgtgcaggtcacctggaagaagaaagctggacagaagaaagaactggtaaatctttggccgtttgacaccagctaccaggggcatcatcgtgaaagagcaatgaaaataccactccacaactgtatgagtatgagtgctaactgtatgtgtgaggatcagcactatgcgggtttgtagggaagctgtcaactgaggtgggaaggaggtgggaggggccatttccatttcctagtttggggtcctggacctagtaagagtagagcaagctgctaagtgccacccgtggatacattcattctgtctgctcttgacggtggctgaaatgtgaccggctatctcaagttcctgctgccttgacctcccctcagtgatagactggcactgggaaacgtgagcttacgtaagccctctcccccttatctcccttttgtcgtgagtttttttgtttttatcacagcaacagcagtgacctcggacagtacaggttagataccaatggttctgcgcaggcatactgcatcacagtggcgagtgcttcccagagcaatgctgctgccagggagggggacattgaagaggatctgctgtgtgttttcacaccacaaacctgaagctgtgggccagcaggtaacagatgagaaccatttaggagccaaaataaatatcttctctttataaggctgtctcgggcgtttgttatagtgatgaaaagctaacatctagtgtgcagatttctaattataaaagtcaatgagcaagagagctgttgtgtagccgtgagggtggagggaagaccacagcttccacctgaacggcgccatgtcggaggagttgaggcctacaaatgctatgccttgggtcctacatcttttccatgacaggggagctcagaaggaaacttgggaatcacatgatccaaattcctgtttcaattgccaggaccctgtgcctctttcaaggtcacacagatggtctgaggcttgctcaggtagaacccagatccaccaactgtcaggccatcttccctctgtaccagacggcccaggtggccaggagctacgacagtgtgtgtggctcactcagggtgaaacttggtgtctgtgaatgcaaatgggagtcaaccttcagcttacacaggcctgtagaggacccaaatgctcctggattgatttgctaaataaatacaatgattttcaaatgattctgtgtcctctggccctgtgaccatacaggtcacttgagaacctgaagtaccttgtgcaacctttcttgttttaattgcaaacaaagatggagacaaagaaattagaaatgcaactggaaggggctatggggtacaatcctagaggaaaagggaggttctgtggggactgatcttgtgaggtttggggagcccctcactcagggatttagggctggagatggccgttgggtgttccagtaacttttttgttactttgataaacactatgacccaaagcaacttggggagggaagggtttatttggcctgtactcctaggttatactccagtataagaagagggactgaagcagaaccgtggcagaatattgcaggctggcttgttctctctggcttactgagcagtctttcagacatagccttcatccccttgcctagggatggcactatccacatgctacttgttcctacatcaaggaaaccaagcaatcaagaaaatgcctcacagacacggccacaggccaatctgatggaggcagctttggcagcaaggttcactcttcccaggtgactctagtggtgaaaagcaaccagcacaccgatgatggtgttgtttgcaagtagggatacagccaggaaaaccctgaagccttcagtacgttcaccgctttagcttattgctgttttcctgtaaactgagcctgcccactggcctccttccttcctgtagccactaaactcacctggagaccacactgtccctgaaacaggaaggagacacatatttattcggagctgtaagatttctctagccagggcccacataaaccaaggaactttgataacaagcctcccggggtcacttttctggcttaacatctaaagctggggaccacagcaccttacacagagcagagagtcaggtactaacttttgtccactgtccttggtatgtagagggcagtttccaggccactgtacacccgctgtcctccttcggtgaccacgtactccgttagctggccattcagaaggaaagtgccactccagtccacacacaacatggattcattgctgtccactgaaaatggggcttggtactgaggcactgtggtgaggaaagcacagctcttaggagtgggaacttctggatggatatacagggtgcttttagaagagtgtcaacagcagtatatgaaatcagccaaccaagcaagcaaacagaaacaaccctgggtgttgctggaaacccattaaaaataataagctggtgtgggaggcaagaagacagccaattggagcatgtgtgaaatgcagtctcagcaacttcatgctgcctccaaaaatcaatggagagcactgttttataaataaaactattaacacacaatgggtttgcttagcaacataacctggggctcagattttgcttcactttcccctctttaacggataaagtgcccttaacactattaactacagtacatagctatttttcatatcaaatcaatatttattgctatgaagccccaaggactagatgaatttttttttttttttgcaccaaactgcttagacggtgaattatgtctttttggcacccatttatttttaaagctgtttcttgaactgttagtttgttttctgagatagttaaaaggccttgcaaacagcaatccaagcataataattcatcgccctgactaatcaatccatagcagagtatattagtatataatcatgcttggctctcctaagttgtatgtcagttctagaagcaacttggtgtgcattttacaggtgtgttctcttctggtgtttaagttgctcactgaaacaaacccaaagcagctcatcttcaatgtaaacacattgttgaaggaacaaatggagtaattaacataccactttttagggtggaagaggtctccttcaggagaccttgttttctccaaaacaatcaagatatttataaagcattacaattcaagtatatcctcatgaaagaaagaagaaatggtgtggctacattggctacattactgatgagagatattataacaaagtaagggataattacatattgtaacatatagtttagatcctgaagacacagtgttgcagaatatatgaccacactgtttgcatttgagttaattaaataaaatcaaccatgggttaggaggcagatccagcaactagttgacagaaagtaattatagagagtcagagggagtcggggaaatgagagacgcacaggaagtaggagggagggacttccagtgtgacaatgcttttggtttgtagtcatggaaatgtgtttctgagatgctggtgaagagggaagttgctccttaacctttctgagctagcaggttttcaccccagcctctgactcccgagtctttgttgataaatagaatgatagctttttagttaaacactacactggctggcagtggcaggatgcagatccagtgggacacagaagtcccgctgggctgctgctgaggagtgggcagttagtgactgaaacagcagtagattcaggcatagccactgtgccggcagaaaaacattttggtgccccatgtgggcttgtcagtcaagttagccactgctgggaattaaactctctgaacttgattatatttacagggcaataaatgctaagattcttatcatttttcttatgtattgcattttactgttattcatgcacctacggctgtttgccctattgtagcagagtgataggttatgtaacggtcagtcaccccccccatttgtatactgagtgctgccacactgtaacgggattctcagtggtgggagcacagacaccatggaagtgggcaagcacatttttctcgtggcaggactggctgttggtcttctgctctccactgaagggcaacccaggtagaggctgaatgtgttcctcaagtccctgggtgagcatgaatgtgctctcattcctccaaaactgcccaccctatttataattatattctagactgtaactctgctccataatttcttccagtgtacataatgagttgtatatagcacattagtgtttagagacccacagtttagtaatttttgcatgttttcatatctgtggattcagtgcggaatcaagaggacctcactccttgttggtctagtatttagttatttcttctccatgaaagaatgacaggaagcaaagtaggaagctggggagagtgggtatttttgtccactttgttctttaagtacaaaagcaaaatacataagcttcatgaccaaagagagttggtcctaacctccagccctcatctggatgctccttggctttctgccagtactgacagtgaacaggaaaattcaacatagttgcttcaggggtgagtcttaaaggagactataaatttagacatcagacactgcgtattgtcccagtgtgctctgattatcagatggacagcaggaacctaaatgttgtccacagtatgagcaatgacatttggggggaatctgagcgccttgcccaggactggagcaggtgagggtcagagaatggtttgggtaggaaatgaccctttgctgacccccctttatgggggttgttgtcttgaagtgagtgaaccccgctgaagaggggtgaggaaggacttgagcaagaggaggaaggagaatgagtgggaaggcttggagccaggtttacaactgtgataaaacaaaacaaaaaactaataagaatatcctcaggggcaggaggggacaggagatgttatcatgaaaagtagaattgcattgacctttgctgacttagtcaatgaaggtgacctggggtgagatatgtgtcccacagtcatgaacacagaggtcaaagacaactgaataggtttccctccagtagcagggaagtagaagagtatgggggagggagaaatggagatggcttgtgtagaatgcactttggagaagctttgtggtgccaggagagggaatggagcttactagcaacaggtgagaagtggctttacagccaagtggggtgggcggggggggggaatgggacaggatggggggcatgggcaaggtcctcaggctcaggctgaaggcaggcaaggtcagatgcaggcaaactgcttacttgtgactcctcccaccccctggaaagagttagcagaggaggttgggtctggctgtgggtgcttgcagagcaagacttgcacagtcagagaggaggaagctcaagtgacctgggaacaggaatgctgggggggggggtggacagccaggcatggtggtgatgccttcgagcaccccacttactacatatgggatctgttgtgtcacttaggtcaaggtcacttaggtcaagatcagagtcaacttgggatctaggtccaacagcttaagttcatgtgcatgtcctgtggattctagaagacagtccacagacactgaaattgctgaaggtttttaagtgacaaaagtttaaatgacagaaggaataaaaaccaaataatgtcaagtataaaaagccaagtatgtaaatttaattatactatgaattcagatacaataaaaactaaagtacagaagaatgatgttgattaagttaactattagcagctgttgcctcttagtggtgggattacttgtaggactggcttcctgttgatgtgatactgtgggtacacaggcctaggatggaggagtcctgggtttagcctgatgctgtgtttttgatttattggaattctgagtaagttttgaaccaggaactctgtattttcctttctgattgcacccccacagatttatgtttctggttgtggtaactatttattttatttctgatacctttttatgattttcatttgtgtgtgtgcatgtgtgaagagttgtacatttgtttgggtctatatgtgtgcgtacagggaaagtagaggttaactgtggtagtctgtctcaggctctgttcccctgtattttgagacaaaaagtctcactgacttggagctcaccaagtaggcataactggatgccagcaaacctagtaaccacccctgatcctccccagtgctggaacaaatagtgtgtgccttcatgtccaggctgtttcatgtgggttctggagagccacctgaggttctcaggctttctgtcactgagctatctcaccagccctaattttcattttttaaactatatatatatatgtataaacatatatatatatagtttatatatacttatgtattgtatatatatatgaaatcagaatggaagctattttataaaaatctaattaattgattaacagttcattgcatgtctgtctcagtgctgaattgctctttcatgccatatctcactgcttcccggaagtgagtggataaaggaagaggggaagtgggggggtgtggggggagtgtgggtgggggagggaggggagcatctttgagaacaggcttagccaggctcggtgacactcacctgtaatcgcaggatttgggaaatggaggcaagaaaattgctgtaaacttgaggcaagtctagtctatatagtgagttcccaaccagcctggtctacccacgtgccctgcacctttccattcttaaatgccatggggtttttctctggccatcttctatctatgacgttgcagtccatgcaaccaaacacaggctttacagttgcactggtgtcatacagtagcccatcccccggcccccccccccgcccccctccacactgtgccagccatccccccatgagtactcactttccttcttggtgctgaaactggtccacccagaagcggtgctgcctgcctcattgtggaccaccacttgcaccctgtaggtagtgtaaggctgcagccccaccaggctggctctgtgcccagggccctggtacttcgtctctgtgtggctgggagggcaggatggggctgaatcgggaggacaagcccggcgcagctgcagtttgtagctggaacagacaggggtgtggagaaagaagacaggcaggggatctgtttgtctgtcaccattcaaggttgcttatagtttttggaagatgacatttcgcaaactctctaaaaattccattttctggagaccctgccttgattcagcagggaatgagaagtgatgctacacagaaattgagtggagtcccaccataagcatgcagtgcctgcagaggccagaagagggcggaagaaccattgaaactggagttacaaatgattgtgagtgctgggaatagaacccaggtcttcagagagtagccagtggctctacctatctctgccacattagcactgggacccctaagtgtgtgtcatcttaccgggctttctgttggggtctgggtatcaaacacaggttcccatgcttgcatggcaagcattctaccaatgaagcagtttctgcagcctcacgaggagtcgttttcactgataaagatcagagttcagatctcttgagaggagcaggataagttgttctcttttacttagaacacaatttacttagaatgaaaacactctgttctttgagacactgacccgacgttttaacttagggcagggcaattcccagctaaggacagaggtctcttttgctccagctgaggtcagcagagtgcaaggttccagagaacccctgggtggggtcttcttttagtgactccagacacaatgcagcctctctcttgcttcaggattgcctttctcttggctgcttttatggcccaagcacttctcaagggacataactgctcaaatgaatggttttgttttgttttgttttgtttgtttgtttttccctgtatgtatctattttgtaattttggggactgctggctgctcacatgcctcggtgtctcctttaggtttattcatcggttccacttacctgtgaatggcaccattggggagccgagggggtgtccactggaaggaggccatccttgagcccagtgtctgcacctgaggtggagacagccctgccggtggggcggggtgagtcgtcagcttggctgttggccctctgctgcagcagttgaaacaggtgcaggcctccaccccgatggcatatgtagtgaagggtctcaggtcatgaagggtctgctgggtggccatgccttcagacagctgcaggagagagggccagatgagggagtgccacaggtcagagatggtatgtctccttctctgaagggaaccccacactgggcactctgggagaagccatgaccctgctctgaagggaaccccatactaggcactccgggagaagccatgaggcacttagcaccgtgttaagtcttagaatggccaatcctgatggagggcagtttacaattaaaagagtcccataaaagttagatgcatcagaaaggaggtgacaaggtagaatatcgcttccctgaccttgggaatgtactcaaaaatggaaccaaacatacaaaatatgggctgaatctaaaggctttcagaaggacttctttgtaacaaaatgaaatataaaatcataatctgcatttgaattatattttttaccactgaaatttgcattctactgtaataacttgcatggaacttaggcatctaaaatgccctgaactatgtcagaggtgggtgcaaatttttaatatttgctagctttccttcttctcagagtgctacttccgcaaagccacttgactttgtaggactaaaaacttctgatgtatatggagcaaacttttgacctcatttagaacagaagcgcttagaagctagaaattaatttccacatagacacaaataacataattaaggagctacctgctatttttttaaaacgcacacaatgtactccaaatagaaattatttgggtttattaatattatcattttataagcatggataatcaagggctgattatatttacatcatctatatttattgactacgaagccctgtagaaaatatgctaatatccctttagcattcactaggagccttgtctgcatacgggtcttcttgggaaattgtgtctcagcaccgagtgtgctagcctctgaggatttctccacagttgcccaaatcgttccctaaattggcctaaataattcataatgtaatactgggatctgctcaatctctctataagcctatgtgaacagagtattataatctccacttactcacgagccacaagggagagacccaagccatgccacagaggcaagggataagagagtagcgactaggtgactctcagtctgtcacctgagaggtgggtttgtagttgcaaggaacattaaatattagtcttttctgtcaaatactgaaaaacttctgtttatgacaaggaaactgaaatattttgatcttcctcaccttgtaaaacccttgtgcaaatatcttaatgctcccacccagaaaaccattcgttcctttactaccccctaccctgttctgggaatttaagtgattgaagcgcatgtcctctctagtttcccctcatttcctttaaaactagtcaatctcaaaagactgtgaggtcagacctcaccaagtggggaaaagacatagccaccgcacccctccccaacccccgtatcagagtaaacaccaagtaaacttcctgttcaggtcccactctgcttcctagctagtctgtcttgccacccaccccacccccacctccgctgccccctttacaaaagcaattgccttgccaaactactcttgccttattgatgtgtgccatgttttcttcctttgtttcctgcatggcttccctctcaacaacagccatggttataacctgttctataagatccctccgttctcttttctgcctcctgcctttcctcagtgtgctaatgatggctgtggagacagctgtgcccagtgtttctttcttgaatatacctttactaacagagcccagattttccttttcatagatctctctctctctctctctctctctctctctctctctctctctctccctctctctctccctctctctctctttctcctttatctctctctgtgtatatgaaaattggggttcccagaacattctttgcttccttttttctttttactattaacatttactccatcaaccttatcacatgtagacatgccaccattcttcaagtacctggcctccatttttctaaattaagttaatttgcctatgtgtgaagtcttgggtttcctacatctctgggatcttcagtaccaccctggtacttgttcctgtttagatgtttccttcttcctaaaggctcagtctctcagaaggaccctctgtttgtcacaggcaatgagagccgaggcctaggaaggatggaaaaggacaaagaggcagagcacagaggcagtggccttcaggaagagccctgctgagtatcgggtcttgtgtgctcaccacggtgttcctcccgctggagttggagaagagccggtagagggtgacattcccattgggtctctcaggtgcactgatgttggccactgcttgggtggaggacacagtgtggaatgtgggtgctttgagaccttctggtggggcaggtccagttctacaccgagtccaggtacttggggcttttcctgcagaattcactgcccataccttaaaaacgaatcaacaagactcatcaaacacaaaggtaccttcacaccggaaaagagtatcaggctggggcttagtggtgcacacctttaatcctagcacttggaaatcagaggcaggtagatctctgtgagttcaaggccagtctggcctgcagagtgagttccagaccagtcagggctatggtgtctcaataaaaagtaaagatagatagatcagccacccaaaccagccaaacacaatagtttaaattttgatcttgcaagtttggaattacaaaggatcacaggacaaggaggaagctcaggtaggttgcagctggctgacaagctcccctctgcctctgcagggcagccgagtggcttttttttttttcagttccttcagactggatggattcttggactccataaaactcagcaattcttaaacaccctctccattaaatctgcatgaaaatcaaatttctgttcatcaaggaggggataagcatatggggcgatgtataatcttatttatcaagaaccatttgtataattaaacacgaatatcctaaaaggttgcgttgggtcaccatttgcatgagtaagtaatttgtagaatgtcaggtacaatagaccaggcggatggatgtgcgagcacatagggttaaattaggcccaataacggccaaccacacagtgatcaatcagaatgatagatgggaatggcaacacaagaggactgtgtctccaagtggtattccttactaagctctcaggtgcaactgtaactttgggggattttttttttcctttgttggttgtcttttactctgcttattaagaaaataaattaccatgggtctttaaaaacaagtacgggaagttccttggagtttgtacagtcttcaggtgtgcagtcctgggaggcatgcagaatgtttaaaaacaagctacactggggaagagcccgagagtagtctgtagtgggagtttcgtcttattttgttcttacatcagtacaccttctggagaagaaacacctcagcagactcttaacaggaggccaagtcctgtcagcatttgtgtttctttctggggcaggtgcctttgtgaaagcaaagttctgaggttgagctgctgtcaaatgtaaatctccagccccctgccaataggattgccagcagctcccttttcaaaagagaaaaccaacctgcgtcccggtgaaaccagccctttaaaggtgttcgaagtctctcctgatttgcatataatcactcacaatttttacggactcttttttttccaggcactttaaaatatttcattttgtggatgtctgtgtactctgtatgggtgtttgtaggtaaggcgctcaaattgtactctttccagccaagcaggctttggatttttcaggttgctgttctgtgtaaataaggtaccaagggtctgaaagtctagattaggtgaggtcccttaatatgcaaaggtggaagacacgttgagaaaattgtctcaactgagcaaattccctgtgataggctggggagggaagaacaggagagtgtctccatgacagccaggcttctgcaagctagcatccaagccagagtaccacccaggctgctcttgtgccctttgaaaaggccaaggtcacacttacagtgtgggatagaatactaggttattgatgaggagatcatatatcaagcctctagagggaggggtacctggctcggggacctggagaccaagcactgtaactgcaacctcccagggatggatggaatggagaggactttcacggcagatgagtgacaagatttgaagagacaatattctaggaaagatgtaaaatagagtgcaaaggtcaatatcagattccctgccaggaacaggctcttggcagtttacaggcatgctgatattagtcaggggtcacaagcaggaagcctgtggagggaggtttgataacagataaatccagcaaataactgcagagagcccatagagacaactgccacatgggggacaggggtggctgggagctgtggagacagatgctctaaagggaggccaccaaagaagtagaggggacagtgcagcccagggctgagagcattcgtttctccttttttaacattaaattttaaagttaagacccaggtgggcttcactgtggtgtttgcacacatgtgtgttaagattttgtttttatctgcgcttttcatccactgctcttccctgccctccggtcttctcgctgggccctgactccctctaacttgtcccctttccttccatctcacacggactccaccacccctccttctgcctcctctgcttctttaagttctcttctatgcccattatggtccttattctactttcctgttcgtacaagttcacacatgtacacacatgtacacacatgtacacacatgtacacacatgtacacacacacatgtacacacacacacatgtacacacacacacacacatgtacacacatgtacacacatgtacacacatgtacacacacacacacacatgtacacacatgtacacacatgtacacacatgtacacacacacatgtacacacacacatgtacacacacacacatgtacacacacacacacacatgtacacacatgtacacacatgtacacacacacacatgtacacacatgtacacacatgcacacacacagtccagattccgcatatgaagacaacacacactgtttgcctctctgagtcggactcattttgctttacacgatgacattcagctatggccatttccctgcaggcatcgtcacttctttccacctcacagctgaataaaatgtcagtgtgtttggaccacatcgtctttgtccatctatctactgatggacatctacatataggctactgtagcaggaagccaggttgtgaaagttatctctgtgcttgttggtttagagtcctctggggggtgtgaccggaagtgactcatcattttccatgtcaatgcagcatgggattatgaagctgctcctggagttagggttgaccttcatgccttcctctgctacagggctttgatctggtggatcttagtttcaaaatgtgacgtaatctaataatttaattgtttttagttgtgcatgtctatttgtcagtgtgtagctctgtgcacatggctgcagcttcctgaggaggccagagagggctccagctccctggagctagagctggaggtggttatgagcttctgcatgcaagtgctgggaaccaaactcaggttgtcctcggtccattatatttgaaaacaagtgggcctcagtgtataggtgttagtgtattggggaatattatcttctaaaatacagacaatataaaatccctctcagagcaggggaatgtacgtaggacctagtattctctcttgtcaaagacaagagacctttataacacaaagctctttgccccctaggcttccttcttagtattcaatcaatttgagatcaaaatagcattcatataaatcaacatgcttatgcaaaacaggctaagcctatttacaggagctacagtgaaaatgaaaatggttacagtgaggagaaggccgacagacagacactaagcaaggtgggtcttacgggtgggaaaggtagctatgtgtgttatacaaaatgccagaagaaaaagacagagactctgtgatggcagcttttctcattctctgccctctaccctctttccccttctatgcctgctctgtgttaaaacaaaaattctattatcaaaaattccttatcatgttttatccatgcccagttaagcaagacacggactgaagtatattctgggttcctaattagaatattaacacagattatgtctatgatttctttttaaaaaacaatactgaatttgttaacatatctaacagagtggcattatggcttacatcataagtgtccaccagaagtcacatgtggaaggcttagctcctcacaggtgacagttatgggaaatgggactcacttaggaatttgggaattggtatgtggaacacccatcacattcagtaatgggatattagaagaaagtcactggggtgtcattgaatgtgcaacttgtcctggcctcttgtcactccttctcttagttctggctgccatgaggtgagcagcttgctccactgtgcccccctctttcacaggcccagaaacaatggatctcagtggccatggccggcggcctctggagtagccgaggaagacattccctccttacgtcacctcaaacatttttttgcagtggcaggaagtgggctaacatggatggagaaatattggctagtgtgttagagtgagctttgcttttggtcctaggagatgaatttcggacctcttgcatgctaggtaggcatttcactacccaatcgcatccgtcagctcccggccctttagttttagtggatcaacataaaaacaacagaacatcaagtatcttctgaacacacatgaacctactatgaattccatgatgaagagggacaaaaaggctatatacccagggcatctcctaaacacactttcccaataaacaaattaatgatggttacagtaccttctgaaatactcactgtttacatttgataacactgtatatgtgttcatgcggctcacgtaacaccacgcattacagtccagaacttcccaggagggaactgttagagactgaacaggtgagcaggccagcacggatcaaggttttcttttttctttctttctttttttttttttattgtaacattgggaagtgttacagtgcaagatgtagaaaccacaaatacttttaataaatataaaatagatgaaatgtttaaccatggattctgtacttgacatcgatcaacacattagtgatgtcagtttgacttgctacctagatagacacacagcactgttttcagtgatatgtgtatttaatctaactacagacacatatcatctttttgcttgttgtccattaaaattagaaagctgttctttaatttactcatttccctcaaagactaatcactgtatcgttctttgaataattttaattactgaagtgtgagcacctgccactaagctgccacacctggacagctgtggaaacagtaagtactctttggattgtctttgagcccagtgccacagcggactcctggacaggggtcttccacattattttgggcccttggaccagcatttctggtgagatgaccccagaacacaggttctcagcatgctttcggctgattcttgcgcccaatattctttgcaaaatattatagaaccaggagcagaaatctaggcacaatcttcagagagtgtctgttgtggaataatctttctgtactctgtgaagaagtgtcactctgattggtttaataaaaagctgaacagccaatagctaggcaggacttccaggcacagaggatgctgggaaaagaagggcagcgacatggggggagcaggagatgaggtaagtgagcctcagggaagcatgtagatggacagaaatgggttaatttgagttgtaagagctagctaaaaacaagcctaagctattggccgagctttcataattaataagaagtctccataccattattggggagcagatggtcccaacaaaaaagtctgactccaagtgtctgtttagagtgtgttttggcatcagcagtacttacagtctttgaaacaaacacaaatgtgtgtgtgtgtgtgtgtgtgtgtgtgtgtgtgtgtgtgtgtgtgagcttgattggccagtgagcctcaggggtcctgtttcaacagcactacaattataagtatgtactactactacttctgtttctttgttcttactagattctaggggctcgaactcatgacctcatgcttgcatggaatgcacttggtgacattccctctcatgtctccttgtggaatgtctgattaaaaacattcctcatggaatgatcgattaaacagcacttcaagtaattctgaggacaagcttatttcatgtagcagtaaggaggagacctcacttttttttttttctttacaaaccagagaatgaaaatacagctgtctttcacagcgttaaaaattcacatcagaaattaaaaagaaaactacaacatgagcagccatgccagtcattaatcagtagagtaaataggttgcatgttaacaggcaaacaattaaattatttgtttcccaggggcatggaaagtgattgttatcactctcccacgggggaggcaaatggatattaaaagggtctttccaatacctgtattggcgtgggccaacagctaattcaatagattcgatcccaatctacacttcttcctacgtggctcctaatttatggtttgggcgctgtttagtcatccgtcagtgcagtttgctccctggcattcataaattatgcctcataaataaaaagatacaatcaaggaaatcctatcagtccctctacagtcttggagtgtgttccctgggcattcaggctaatgcctttttaaggggtagcttgccacgggttttgaatatgtttgaatagtaacaccaggatgggctttgccggaactgcgtaaagaggctcaccgctgaagagagaaagcaacgaatctgcaattgcacgcctatgggactattttattttgtgactcgcctacaggctccagctgggcagggcttcttgtctgggggctttgtgaagctgcctgcttcattacctgtctgactctttcatcatcaaatgggctttgcccggggcctctgtttgccaggtaccttgctgatctgtgagaatcttccttgtatggagtccctgcgttccgggtttttttcatgggaacacttgggatcaagcaagattaaattccgggatctagtggaagacggggatgcaaaggggggggggcactgtcttgctttctacctgcacttttgaaattcagagacgtgaagttgctaaagtccttaggagacattgcccatgttgtaaatgaccgtctactgtctccactgccgaggcccgggcggcagcggctggactgccccatagatgcgcctaggactcccttctaaaccatgaggtgggagagccggctaaaatagagtgagagccactgaattaaccttaattcccacttcatgagaacgaaggtttggagtttactgcttgctaagttttgtgctgtctgctccgctttgaagggaacaggaacttgatatcattccgctttcagagggaacacacaggagggaaacagctccctttgcccattagcttgcttgctgtctttgctaccaggtgtgtctgatccacggccccattatgccccaagagtgaaattgacccaacacagagctgtaaactttactgaaagcactgtgagagttttgttgttgtagctgggttatgtggatctccagcatgaactttgtagatgagagattaaggttgctcatgtgcgatgcccctctgtatagttttccttagttatgataaaaagttaaatatgaaactttagactcacaaagataggatagatgatagcgtattttctttaaatttgtcaaatacaaatagactaaatattgtgactgtaattcttgcttgatacctgtcttgttatatttaatattactatattaaagttaaaaccttccttcttaattagacagaaatggggagtgatgtggcctgctcctctgtatgctgggaatatgttttattactattggttaataaagaagaggatctgtccaatagctaggcagaatagagctaggtgggaaatacaaatagagttacaaagagaaagaaggcagagtcagggatactccatgtagcttctggaggagtcagatggcagagcattactggtaagccacagccacctggcaatacgtagattaatagaaatagcttaatttaaatgtgagagctagttagtaatatgcctgagccactggccaaacaattataattaatattaagtctcagagaggttattcaggaactggcaagaggaagagaaacttccagctacagttacaatgtcaagaggttggtcatacctgtggtggttaatcaaggcatttaatcatttcaacaattccatgcagttggcattaatactctcacaaggaaactgaagtgcctagcagtataatgcaatttgctaagtgtagggcaagctttccaggatcgtgcttagctaatttctcatatacttgctaagggatggtgccgcccacagagtgctgggccctcctatgtcagttattaatcagggcagtcccttaaagatgtgccaacataccgcagaaacacaactgttagtgaggagccatgagggcagggacagtgacccatcttcaccccaccgaagaagactctagggcttttaatgtgtgatttccagcaaatacccaactgttacgataaatctttctgccaaatgccgcctgatccccaccgccacctctgagctttacgccagccgcctgcccgagttaggcccaaatgaatacacagaaacttgtattaggtacaatgctgcttggccaatgactaggattctcatctgttagctcagtctcaattatcataaacctatatattttataagacttatcttatcggatgccttgttggcgtccctccttgctggtggctcacatcctgctgctaaaagaggcgaacgggaaaaaggggcccttcctgtgtctccttcacttaaatatgagtctccttgctatgtcacttcctgcctggatcagcacttcactactacatttcccagaatcctctttgactcctagtctcatctaacttgctatctcattggccaaactattttatttaacaatcaataagataaacatacacaatacattccccatcacacaacaatagaaggttcaatttcaccccaagtgaaatgtaagtcattctctacccgtgttcaggtgagtgcttcctggggttcagatgtgtgtgtaactgtattcagatgtgtgcctgtatcaaaggcaatctgaaaggctggcaagtgatagtggtttaagaatagattcctgagggagcctttggcctccctcagggagcctttggcctccctcaggaaggaaggacatgaccaaggccaaatggggtgtggcccatggcccagtggtagccccgagttccctatctctggggattttttttggggggggtcaaagttacatctatgcattcaggctctgctgtaatagaaccatagacaggctgagtcagacaatgtcgataaatcattcaagaccttgagctgtggaagatgagatggcgggagctcagttcttgtgggagaaactaaacaaacagaagcctccgtgctggtcacaaatatgttagtgagattaacacctcatcaaatgcaagtccaaagccaaacagaaaacatgcttgataagttgcggctaaatgtggtacagaaaaggcttaggaagggggtctggcgtggtggtgagggcatcagaaagcaagcaagacgaggcaaagagctggcagagaaaagtacagtaagactctcaatgatgggcatgggggtagagtcctcagtcctgtgtgagtggccacttgattgtttctctgaagagagaagttgaggacaaagaaagatggactggaacaacccacacccacaccttcagagccacttgagctcttgattagaaattggtgccgtctactcctgaagattcacctatacagaccagagttcccttcatctggctctatggacagactgggggtggagcatgggcccaagacccaggagtcctactaatacacaatgctcattcctatagcacacctgagtagtaaatgacagaaaggaagccaggtgaaattaaacatcacccaaggtttgcggtgtgtatgtgtgtgtgtgtgtacaagtatagaggcaagaacctaacctcagctgtttttcttcagccaccatctacctcctttttgagcctttgtggtttggggcttccctagtgagctggactggctcatcagtgaatcccaaggatgcaactgtctctgtttccacctctgcttcctcagtcctttggttacaagtgtccatgactattcctgggtttcctttaatgtgagtactgggattcaaacccagggctttgtgcttatgctgtacagagagccatcttcccagccccaattttgtgattctaactctgctgttcttgtggagaagagaagttgtgagaggtgaagaaacagggatccacgcccttcccaggtgtctttggtgtggggctgtacagtgcgattcttgcttcagactgaaagcatttcccacttggagaaagtggaccatggatgaggcatgctcacttacagggcttcattctctcagttcttaggaaggcatgtggcataacaggccaagtttagagtcctgttgtggcaggcttaagactgaagggcagtcctcttgcttattcagcaaggaggatgatgataataacaaccattattatgttggctgaattacattcctaggtatggtatcttgagcacatttatttttatgctgatttaacccaaagcaagcctatgtgttgtactgggtgaagctacccagggacaagagaagatgagagggggatgaagagaaggaccaagagatggagggggagggggactgagggaatgaggggctgagggactgagggatggagcagagaaagaacaagagcttttagtcttgccttgggttgccaaggcctgatgtcttagtctttctcttggtgttgaggagttcctttagtctctcccccagacaagcagagcaattcccttgagtgcagtctagcttaatgtgttcctctgttattggttctaacataggcttgatatcaaattgatgttacaggtttcctctaagacactaaggactcatagcctctaagtgaaacagatttatgacttatttatacttacatattatgatgcttttgtaattttaaaataaatttactggtgagtaaatagattaggtcataataagataggtccatatgctcatttctgtgatgagtagctatgtaggaaggaagaactgagtgaaggaagccctgagtgatcacacactgttgacatgtcacagccatgcccaggactccaaggactcagacacatgggaattggccacatcattcctcatagggaccaggctcaggaaaagcctagctctgctcatgtgtgagtgttgtcctgattgatcagcgcgtacaaatctagcaactgcagcctcctcctcctggatgtttacagcctgaggagttcacacacccttcccgaccccagccttctgtacacacatctgtcagggttctaggacccaagccaagtgggacaaagcatagctgttgtatcaacacaatttaaagctaaacattgttactaaatgaaagtgttttgggtcaggatttattttgtgtagtttcacaagctacagattacatagacctgtcaggagaaggtaaaattaacatggggtgtggtggtacatgcctttaatcccagtactctgcagactgagaaagacagatctttgtgaattcaagtctatgtagggcttcatagtaaggccctgtctgtaaataaataaataaaagctaaaacttgatgtgaatttctttgaactcctgtagcttactctttctagaacttggagctggcgaggaaaactacttgttatagtggggtgctgcctgctaaatgagccactggaaatccacatgctgagtctcactctcagcgtagtggtatttggagctgggtcttagagagtggtgagttcctgctggatggagccctcacacacggggttggtgtccttatgagaagacactagactctccctctctgtgtccttcctctttccctcttcctctccctctccaccctgcattatgagatatgacaagaagatggcatttggcaaggcagagtggtccctcaccagacatggcatctatgggcacctgggtcgtggatttcaaaatctccagaactgcgagcaataaatgttcacagtataagcttcatggtcagagacattctcttacaacaagtgtaaactcagacaacgagggaaagcaggaggaagctaaattgttcaaatacccagaaggctggatgccactgtctctctgagtccctcctagctcatcatgcgtacctgtgtagcttttgtggcacccacagtgcccgactgaggtctaatccacctgcctttggtgaggcctccaaggacccctctgctccttcacaaccctctggtcttcctcttggggaacatcgttggctggttagaaagtagcagcttccagcatgacctggctgcttcagcctcagacccaagaccagactctcacatcagggagtcaaagtctccggcaaggctgagctacagattctcagtcacccagtcactaggcaccagagccctgggagcctgagtgagagtgtgtgtgtgtgtgtgtgtgtgtgtgtgtgtgtgtgtgtgtgtgtgtgtgtgtgtgtgtgtgcttactgcaaaaatctgtcaatgtggggaagtttcaggagagctaattaagtccctgtcagcttgagtcagtgaaagggagccctggcaggccccacaactccatggcgagtcattgccttgagcgagagtatgaatatgaatgcagaattacctggagctgctcattagccagacatctctccctgaggtaaaagctaaagtgcagggcttggggcagagctccatggtagaaggcttgctcagcttgcacatgcaaagccctgggttccatcctcaactctgcaaaaccctaggacagctcaggagggaggcgtgcctggttcttcctgaagcctgtgggaagatcatggtggtcctaactcgcttgttcattcatcaagaactttctggcagaagttcaaggtataaagagtctagctaagcacagtccagttgggaagggttcaaagtagaaagtggtattgtaggaaaaataccaactgaagtgtgtaggtgtcccatggctttgcctaacagccatgcgatgcccatgtaaagaacagtctactcctgagaggatttcactcagcatagagacatgaaagcacacctatggggctaagaatcagattccagcactcacatggactattggatttctaataggactctgcctgccttgttacacaaagccacctacctatctccgtgaaatacaaacaagcatttcctaacaccctccattcagattttacatcttacgtgttttcctccttccttccttccttccttccttccttccttccttccttctttctttctttctttctttctttctttctttctttctttctttctttctttctttctgttcaacctaatgttctgtgtttgagccttcagaatctcagactcccaggaaggagctgtgttgaaatggaaatgactcaacttttcacaactcagaaagtctcattttacacagtgttaactcttaacctccaaagaatgagaggaacacagaaaaacaatgcaacaacgacagggatgagaaaagggctctcaaggaaaccttgtaaatgcttccccagtaaacactgacttcatttctacttctataggtaaagagtagggcttttccttaagaatagtaggatggcatgcccattgtggtgcttgattttaatggcaacatttgaagaggcagaggaagaatggccatctctgagtttaaggccagcatggtctacatttgagttccaggccacacagggctacagggagaccctgtctcaaaaccaaactagaatcaattagctgtgatagctcacacttgcaatgtcaacaacttaggtggtgtgagtgtaggagaggactgtgcctcacaattaacaggggtagttacaaaaacaacagtgccctgtgatgtcttcgactcacctcagcctatcatgtgggtcccttggccatcctacactcttgatgagaaacccaactagagatacaacacataactaaaacgtaaatgccttaaaaatggagctgagatgtctacagatatgtgatcctgctttaccccaatgacacagcaaaggccaagggagctgtagtcagtagtttatcttcagaatctcagtatttactacaatccaaagagtccaggccagttccatctacttaagaccctgattgagaactgagggatctctgacaactgcacgctttctggtgaagctaatgagaaaagaataaagggaggggccatgctggcctcggcagtttcactgtgttctgattctgagaggggcaaagacaggttattgttctttactgacatgagccaccatcctactcaaagccttctactttgctgtgctttcggaatattttgaggggccgtagggagggcttggcagttaagagtgatggctgtacttgctaagtgcgatccctagtatacacattggagagcgcacaggtgcctgtaactatagctcaaggggatcaaatgccctctactggccttcacaggtacttgcactcacatgtacatgtgtacacacacacacacacacacacacacacacacacacacacacaattaaaaaaaagaaggtaacaaattttgttttgttattgttttgctttggggggattatggtttctctttgtagtcctggctgtcctggaacttgttttgtataccaggctggtatagaactcacagaaatccacctgcctccacctgctgggattaaaagtgttcactaccaccgcccagcagaagtaacaaagtatatctcctatttgctctacaattgtgccaatattatccaggtagccatcttatcacaaaacaatatttttttgtgaagacatattcatacgtaagcagaaaagtcaataaatactataaatagcttccaatctatttagattaggtcttgcaacccaatagctggcacctaaccaagagaacactcttgcttctagtagagtttttagatttgtaattacaagcaataaatttggatttatgtttgtgtatttctgcaattcaatagttgatttacaatttcaatactaacttcctcaggcaacttgtgaaaatacaatgttgtcctgagatagtcttttcatgtataaatgtcacctctaatgaaatcatcacatttctttgtacctgttacattcctggtaattttattgtgattctggtttgcattctccagcttcaacttctggagtgctgggaatacaagcttctggcagtgctgggaacagaacccagggcatctgacctgctaggcaggcaccctaccaactgggcttcagcgcccttgataagctttttgggtttaatcttttttttctttaatctgaagatttttcttggtatttgcatgaccttcaggggttatccattagcaagctttttctgaaccacagctagagaaaccaagtctggcttaagtagaagaaggagcactatgggagcctatgaaaccgaaggatgggacttggaaacggtatggagaagagactttgaatttgagctgggggtaattccataaagacctctaacctttgtcttttaaaatcttgagttgctgatgaaaattgagcccccagtgagtgtgtgactgagtgcaaagctgtgtgcatcacttatgtaggaggcagtgagacagcagatctgtcctcctcaggaaatggtgtggcagccacagagccaatgcatgcagatccaatggcaaaacaaagcctcacatacagccccatagatttcaaaatattttccaaatgccattcttaattcctagccttttaaaatgtatgtgaatatttttaatgccactgattgataggtggattgttctttaaattttctctatttccacaggcagatcagttatagccttttgattcaccatcttgtctttctcttgagcatcgtgactggtgatgtttgtcactgtgctcgattttgctttgttataacacatgagttattttcctaaggatggtttaaggagtacttataaccaaggacacaggtagaaggaagtctaagagtagaaaccatatctctaataaaggattcatctgaaacccacagaacaagcaagcatgtggaccaagaaccaagaaaggaaaagtgaaaatgaatggtcttccttccctcattgactgcttagaaaaactgaaaggatataacaaccttctgtgaaactacatttcactaagtggcttttggaattgcaaggaacagtatggaagggatctctgatgggtgcacaccattgcagcctgggtttttataagacatacagagttcttacctgatattcatactctgtgaagggtagtagttctgaatctgtaaacgagcttaagcttccattgtaggttaacaatggactggacttcccaggctgggttgttatttgtcttctgtataattcaaagtatatgatttttccattgggctcgagtggtcctgcccaccacacagctactatgggctggaagctccctgaagctgtctgcacctctagatgtggggctggttgcatcacaggtggtacctctgtggtctgtgtagatgcccagtcgctggaagtacatgccaggacattgcaggcttggacacgaatttcatacctacaggaaacaaggtagaatcacagatgatccttagatttctctgggacaattcttttaaaagaccacatttttcagaagaaaaagaaagggagtttatatttatgaacagccagcctttaaataatgataaagttttgtttttatgaaaagttttgaacagtttcaatcttctgctttgcaaactcaaagaaagaccttcatctgttttgggagtggtcagttcttgcctaaagagggatgcttggggtaaagaaactgtaggtctcctctccagcaagataattctggtactatacagacacagcagtgaggaatacagctttgcatgggacccagactcctcctacctgtgtagccagagccaagctactctctgggaaagcttccagattatgaagggacattgccgacttatggtctccatggtaatggatcttctcagcttgatacctgacatgttaaaacaggcttccttagctcacacaaagccttctgggggtaaagttaaccccctcacaagctggggtatccatcacagagacactttatcactacccagccaagctctactaatcaattatgttttgcctcatagctggtatctaccactcgggaaggcttatttccatggcagaaccttttcctacacaaaggcccctggttagtgctgactcctgtggcggccacaagcacttgccgcttctctttccatgcccacagacttcatggcccaaccttcccctcaagcccatggtggcctttcttccctgcctcctcctcttggatcaggttgtttcttgctctttgctgcctcctctccttttgtccctgctttctgctcttgatggctttctggttttgcatttttgccttcttaattatacctttttcatttcctttgtgactttgtgaatgttagcatgaactgtcagcttgacaggatctggaaacacctatgtgaagagcctctgggcacaccttcgagggataattagcctctgggcatgcctaggtgggatcatgttgatttctgaggtggcaacaccatttcctgggcttgggtcttagactcagcaaacttgaggaagtgagttgagctccggcactcccctcaccctgctacttgactttggatactatgtggccagctgccctcagcccctgtccatgactcctcaaatgaaggactcatctgtgagcctgcgtaagcccctccctgcttaagttgcttttgtcagggcattatcacagcatcaggaaatgtaactaaagcagactcttcttcattaccgctccctctctcctgtcttacatggctctatgccagcatttgccaactgaacagtgagcagatccaccagtgagtatggcgggtcaaattgataagcaatgtttatgcttattaattgggtcaattttgactttccacataggaatgatttttctcaattatctgtggatcgtttcaaggtcctaggtcaagcgacagatgcaactccattggtagaattgcttaccaagaacagatgaaggcctagattcagtcccgagcactgtttcatctgagcagtagtacatgcctgtattctctgcactgggggagtggagcaatgaggactactcccccagtggtcctcattcaaggccatattccaaggtccatattcaaggccaccccaggctacacgagacctatcttaaataaaacaaaagtagctggatgtggtagtacaagcctgtaattccattgcttgggaggtggaggcaggaggatcaggagtccatgatcatcctggatgatggagtgagttctagtccatagtgggctacatcagaccttctttaaacaacaacaaaacaatgttctgggccactttctttctgattcttgaagattcctaaactgcttcctactgaccagctagggactctcaaagatgagcacactaattttcattgtgtctagtaagtatcaagtgtggtttaaaacctacaaaaacccaaaagacaagaaatcaaccgatacagcttcggtactctattatatttcaccagcatcaaggcctcagctgttagagggttctgcctctccatgtgcccttacatgtccttgggaggactggcacattagtcttctcatttttctctagaaagaatgttactttgacacctgggaagcattttctccaggaatccttttctatatcattgctgggggaagggggagcaagatggacatggttttaacactgttgcagttacataaagaagaaaccctgacaaaatgcacagttgcaccccaacataggctttttaaagatcctcagtagtgggagataaaagccaactcacatagcatgtagattagctgtggagaatacctgaagagcttttaattactgtttaatatttaatatgatgctaaataattgccctgagtagacgcataagaccacgaatgcttcattctaatagcactatacagcagagataatcgtatctgtgtctaatctacacaccaggacatcataatcataggtgagttttagcttcagcagctggacatcaacatttttgcagacttaatttttttttattttaaaaaagtgattctattcaatttactaaattttctgcacaaaatgtcttctcccccccctctctctctctctcaagtacgtggaatgggacgagggaaaatgtccagatgttcagatgctactggaagagtgttggtgtagagcacccccatgcatgtcacagagggtgggtttaaaataggatggcacatatcagcaaagaggcaccatctgagaagtcagaagttcaaaacccagggagttctgtagtggacatggaacttgcagactctattatcgcaggaagaggtgttagatttgaatgaaggagggctagcctccagacaaatactggtccagtatacttctggctgatatattttagctgtgtgtatgagtgtgtgtgtgtgtgtgtgtgtgtgtgtgtgtgtgtgtgtgtatgcatgtgtgtgtaagctagatggtgtcacaaggtgctcagtcactttccacactctttttggaaaacagggtctctttttgaatctggagctcactgactcagctagctggcttgggaacccgatgggtttgactccacccctcatgtgccccactagatgtgaggttataggaacaaactagggatctaacccaggaccccctggttgggtggcaagcactttgcagactgagccatctctccagccctcctttcagcttaataactgttcagggtctgcaactcagttgaggagatcggccttatttctttatgatctactctagacgataaactttcaaaatttccggaaaactggcatcaaaatgtcatgtgtaatagttgttttccagagactacgaaagcacactgtagttaagtgaagatgggacctgtctactgtccacagctgatgcacaggggttggtctatgcatcttgccctgggagcctcactggcactgacagagcactacagaaagggcaatgaagtgcttgtcggcttacctgtgaaatggcttcaggtgtttcattgtgagtgaccgtgtatcaaaagaactgtgcgttgcattgatgcatacagtttgggtttccccttcaaacatctcatggatgaagagtgtatagttgatgatttcaccatttgccctcactggagagtcccagtccacgaagatctcaagagcatccccagcacgcagctttgggggctgtaagcctgagggggctgaggggctggtttgatccttgacaggcgggctcaagacacttccctggctgttggtggcagccactgagtagctgtactctacacccggggtgagggtaaaatcatggtagcgagtttccagccctgtatacacaatggctccatccctccaaagctcatagcttctgatccggccatgtgggtttcttggaagtttccatgtaatttctattgattcggagcctgtgacttgcagtactggggggtccatgttctctggtggggcctccattgtccaagtagatgcagttggactagcagcacatcctccatttgtgcaggccacgagggagacgttgtattgagtaaaaggctgcaggctggaaaccacaaaggacaggccctgcccagccatgtactcctggccatcacatctaagtaaatacttagcaatcttgccattttgctttgagggcggggaccaagacacatttatctggctggcactgatggcccaaagaactggagggctgactcctgacggaggtgcttcaggggtggtgacggtgttgggtttgctggtacagcagccgccactggtgcaggccaggactgcataactgtaagttgaaaagggaagcagctggctgtcggtgaagttgacggtgctggcgttgaaacggaaaggttgggaaactccgttcctttgaagtccgtaggactggataatgccattagaccgttggggtgggatccaggaaatcagcagtttggggggattcatagacacacaggatatctcaggtggagaaaggccttctgggggcgcttgcaatgcccttaccgctgtccaagagctacaggtgtgccctgcggaattccacgtgcagattctataagcatattgcctccatggctgtagacccgtgtcattatacacccaagagttcctttccgtgttgtattcagtgaaaacgatgttttcacctgtctgagttgtcccattgccccgatcctctctctccaagtctctgtgtcgaatcacttcataacgagttatcttcccattcgggttagctggctgagaccagtgtagcctcacactggtggactccacggactggatggtaggagccagctgagtatctggaggggcttcacctgtccggagaggttggggctgtgagcaagcacagcctgctgctgtgcaggcctccagggtcagagtgtagagggtgaagggagccaagcgcctgaagagaaaccatcggcccaggcctgagtactccaggagcccatcgctgaagatgttgtatgcctgcgggaggaagagaagaaggtgtcagaggtgcggggttcttggtgcagttatttaatctgtctaaagtgttcacacctgcctgcctgatcccatgggtcctaatccattagcattcaaacgccggctgtagacgtgggatctgccatagttcgtgtgaagtccacagaaaactttttaaaaggttggataaaatctgagcattgacccaaacctcaggctggggaatgctatggcttacagagtactcgtgaggtttgaatggcagggagaacattcaaatctcctatttatagacactccacgcgtctgatctcatcccgactagggtacgtgtcgggtttaactgaacagtctgctttcctctgagctttctgtgaaatggaattagattgctagttgtccttgttacaggatgctaggcttgaaagtgtgtacctacatgtatatgaatgtgtgtgcaggctcacttcatgtcgtgcaaatgtatacatacatagtcaaatgtgtgtatataatacatgggcataccttcacatagtttatactatgggaaaaatgctttgttttctctttgaagtcatagaagaattgattgtttctttggtggtgtttgcccttgggctgggcaagaccatggtgctcatcagacccagagtcttaacctctgtagcaatcgtttgtgattacctggagctgacaaatactatccagctggtcttactttaaactttgtccataatcctctgttaggtaattaagaaatagtaactctattccccccttcgcatttgcactctcattgtccaaagtaatcattatatatcttatcctttctcctctgtcaacatgcgtctctccctcagggttggttgtggacattcccatatactccagttgagacacggatgaaattagaaaggtgtgctttcatattgcttattatttccattcttgtgaatcctgagtctcatactccagttggtctctgatttacaggatctcaacttccaggttttacctataatctggtgagaagacattgattggaacagccattttctcaactttcagtttggtattcaacaaatgataccgctaatactttgttataaaatagtctttgtgggaggtgattttggtcctctgtaggctaattgaaatgttgaaaaggataattaaagtaggctaggtcgaactccagtgctagggaggttacatgttcagcgtacactttcagttaggtaatattttcaactatctatgagtttctttggctgtatcccagggtaggctgaagagatctgaggtcatcttggctctgtctctatgactgacgtgtctatgctcagtccactctcgacttattctccttatctcctccatcaccacccccttctggctatttccacgagcgtttaagtgtgctctagcatctcattgatttttacataaagtctcaacaccctggctaccttcccatttctctgatgtccttcccatctcagtgagtcgccgtcttccctttcttggtcaccaacttttccaaaagccaccccactcaggtgtctttctctagccaacatccagcacctttctcctcacgtttggcatgtgttacccacctacccttccctcaacatctttgtctcatttcacattctcctgactgctttcctcttcaggacctccaaattcctggcttgaccccgggatctcctcatccccagctgcattttctccgcggtgattctgtacatcaccaaggttttaaacgtggctgtctgccgacagattgcagacacagatctcatggacatcttctagcggagttctgaacttggtctctgactagctgcttgctcctcaaacccgttcctcttcccactttcccttcccagttagctagcacctcaggagcaaagcccagaaggcaatctgaagagtcaccacctcatcgctaccgtccacatacattcccaatacccccgtgtttcttgacttcacaatttccaccatctaatttgaattctaccctgaattctccaatagactccaaactctattagtttctcacgggtcgtgagtgtgcagccggagtgagaaatgtgatcatggcactcctttgcttaaagccctcaggagtgcttcattgaaccccgagcaacctccctgctcctgccacagcctttgccacacaaggctgggcccacactgcctcagtctctcttggtggcatccttccctccttcccagcgctttatccacacaggctctcttccatatccttgagcacaccaaggtcactcctgccttagggccttgcgtttgctgctcattttgtctggaacattttcccccatatcttcacatgactgcctctgtcttgtcattcagggctcagctcaaatgtcaactcaattcaaatgattatccattttaaaatagcctgagcaggcataattacatgactctatttaattttctttatagcatccatggctctctgaaattccctgcttgtttatttaccagcttgctgtgtgtgcctccgtccctctttgactcaacactcccctgcatttattcatacccatggaagggccttggcggcaggggccttttctgtcttgttcactcttgaataagtgcacagcacttagtagaagctcaataaatatttggtgaaatgcagatgaaggggagtcaatattcctcttgtcagtcattctctggagaggcggtcgttggcggggagggtggggaataaacgcagaaagagctttgatgggtggagggggaggctgcattgcctgggagggcctgagaactgagtttcaggacttcaggttggggatttaggccgtttgccctggaggacgggtggtctgatgtctgctgggggaggggggggagtggcttgcctctgagtgtcttttattggcctcagggcctccagctaagctgagtggcagtccagagaaaggctcaggaggttggagctggctccagagccctgagctatggatgttttttcctgtctcctcctccttctagggcccaggagttgaagttcagtcttaactgtttcatttggaattggcgtgggcatctccagcctctgtggaaagtgatagaggcagactgtggctgggcttctgtcatcctgacccatggagggaccaaaggggggcaggcagagggagaatgagtgggtggatagctgcagccccgggaagaacatctaggagaccaggtgggtatacctcctcatgtagctaagggtctaatgcttccgagtatgggctgttccagggaattccacctcctttacacccccaggttggtgtaaagggcttcacttgtgtcatttaaaggccagtttcgtggctacatgtataagtcaaggagttagcagatggagccgacttcctgagtgaattaggcagggtgaattagctaaggcttaaggaaataacctaaaataaggcagcgaggaggcagtaagttcagggtcagagatttggggacttctttggcttcaagtcccacctcatctttggcaatattgcctgaagcatctacttaagctttcggcctccggaagtttagtgggccccacctagtggggttgatgcgtgcattaaatgaggcaacctcagcacactgctgggcccatgccaccccccaccccatccccagctcttcttcactgatcaaggatgaagtgcctagaggagccatcaaggagaattagaccagcttcccagtgacccgatggcatgtcagggcacatctgtttatctggaagacgaccagtgtcattccctactcaggatggactctaccttgatcactccgttggttctcactggctgcgaccactggagcagcaaagcccggccgttctctctctggtccactgtgaagttagtcaggccgcttggggaagagtctaaagttttcaccagagtccaggggcttgacccttgtcctgcactgttcacagcgaccacgcccaggtggtatgttgtgaatggttctaacccaaaaagatgagcttgatggcttgttccctgaaagaaagatagcaagttaggcattctttagaagccaatagaaggtaattctctggactgcacggccatgtcaagatgcctgcagggcattaacaatggcatagatacacagctaagttttgaactcacgttgaggagacagggactattctttctgcctgctcttgtccatgctgaatacatcaactaatgcaggggttctcaacctgcatttggggggtgtcacagccctttgggggggtgtcaaacaatattttcacatgggtcacatagaagatatttacattatgattcataacagtggcaaaattatgaagtagcaacaaaataattttatggttggggggtcaccacagaacgaggaagtgtgttacagggtggcagcattaggaaggctgagaaccactgaattcatgatttcggatatgtggaaaagttgtatcagatgggacctggggatttccggcacttgaaacctacacattatggtgcccatgatgagaactgcattgagcttaacgaagatcagtggccccaagttgcatcctagcagcttcggggaagtggccagtaggttaatcggaagtctttgtgagacttagcaggagcaatcctaacctccgtgcacgcgccaccctcctctccccagcctcgcccatttctttgtgtgctgtgcatttgtatcttacaaacttgataaaacaaacacaagaaaacggcaatgagcccattgaactataaatgtacaaacacccttggagaagcctgttattaatgtaaatgtgaaattattcctatttgtctgaagcagcgtaactaaaaccatgaaatgccccaaagtgattgttatctaggctttgagaattttgcctttgttgatctaaaagaaaaaggggatagcagaattacttttgtttgtttgtttgtttgtttcttcctcactgagagatatttaacatattttgcataacttaaccagagctaagaatcttaacgttctgagaggccctggggtgctcttgccaatctgggctggatggatatgtctgtttaaggtaggaattatgcctgcaacagggcaggaacatatgcacaagcacacacacacacacacacacacacacacacacacacacaccacacataccacacaccacacacacataccacacaaacaccacaccacacattcacactacatacaccatacacaccacataccacacacaccatccctccccacacacacagttttgagaggggatattttctattgtggaccataagcactgaacatgagcaaccatgactaagttttgactgagtaatgatatttacttgtaatgatacatgtgatgatacatgcttgggtttgtcagatgtttaaatgtgacattgatagtctatcaagtatttctttttgttgatgggtgaaggcagggagaagtaactggctgagaacacaggcacagttatgaggaaggatttctcctaaatttggaatcttctaaatgtcattttgaatgaaactggaaaacatatacaaccaaaaggctatagacatattttttaattcttttctcccattcttggtttcaagttttgactgagcgatctctcttattctgtgaaaaagctgggcagagaaaatacagtttcctttatggacgtgagactcctgaagtcagtttccctgtttcagtatgtcccgttatgatattacacgctaacctcctgaaatcctttaatatttaaacgtttgctaagcggccggactctgaaacaaattttacagaaatattaatttctcttttttaaaatattaaaagttagatcatgaatatttaaaaacttatttctccacaacaccggattggtcttttagataaatatagcatcaaacagggatgaccacatgaatattaaatccgacaatgcttccagtcctgattacaaacactcttttctgacaaatgatttcttttctctggaaatagggcaaacatgggtaagattaataatgcaaaaaagaataattctttgttcagaacatttggcaatagatgccaataaaagtagaggcccgaagtgaactggaatcacctctaacagattatggataagacagtgggctgttgtggcacactcagcgacagtttctgtcacaagaaactggaagagcatgtgggccataaagcaaaaccatatgcatattgtcaatagtggcacctgctccattcccgtttattccatagcagagacttccgttcagcccctagatggcaatgctatcaaacccttttcgtaacacgagtacttaatgattaacagccggctgtcctatcttccaacatactcccggcaaccattaaaaaaataacagaactgatttcattatagattctttttaataaacatttatggctcagatccttgaaagcgaagtattcaaaatgcccccccacccggcccgtgcgcgcgctcgcctgaaaccctctaccatcaagtgtagaaacacggcctgtgtgtctcgagctcctgcatgcctggtacagatgtgacaagtgtggtcctgcattgggtgattttaacagtgcttttcttagtctggcttccatttaacttacactacacaagtgcgcccatgttttactgaaggagagttctcttgttacttggttatttctggagtcccgcctcaccccctcacataccctcttcacttttctcaggttctcccatcttttccagggtttacattcgcctcccccccacttctctcctttgcatgtttgcagcttggtactttttctctttccctttttaattttcattatttgtcttctctaccactttcattatcctttcctactattttaactcttaagcaactttgtatttgttgtttgaggcagagtctcatgtatccaaggctggctttggaatggctatgtaacagagaatggccttgatgtttcaattccggccaggctttgagtgatggaattaccagcatgtaccaccatgctcaatttcaggtgtgcagggttgaaacctagtatataaggtaagcactccgccgctggaggggcgtccaccccccttcggttcttttgagctacaaacactgtatgactcacctctactcactcccccttttcttagccaacccttggctatggtggtaaccttgccatagtctttattgcagaagttttcctgcttttgttacaagcagatgaagagaacaactctttggaacaaatttggaactaatcctaatctgctctctccacctaatagttcccctgagattcagcctattttacattttacaatgcatatgcagacatgtgggagctgggagacaaatcagtgtgtcatttatgagtcatgaggacagggctgtctggaatgcttggccggctgcggctgctgccaatctgcactacattttaacctctcaactctgctcctgtggacacgtgaaactacttggagccttcagcactctgacagttttacaccatctcctctgattatttttgacgacttgaaatgccccaaaggtggccaaggggtcaataggtttatgtaggttgaaaatgatcaaaaattaccattgatctgtagctgtcaataaaaggctgcatggggatagtccctgcacaaatgtttaaactgcagaaagctacctaacttagtcacctttgagtctattgatctgatgatccagcagtttccagagccttccctctgctctttgtggggcattttcactaagccccatctgcctcagccgctgggaagcttctttaggctacttgcagtaatgaagccaacgtggcagggcttgggggctgctacgcccatcaaggagtattatgcgtgcttactacaatttggaaaagggtgaatcttcgtgggcaccgttcactgcatcccaagtcaatgggatttcttctgccgtttatttgctattctttttccttggctccctgtcctaaaatggatcagttctggcttatacttacagaccagctgaggcggcggcggcggcggtggggggggggttctttacccctcagttctcatacaggcaaaatcccagagaataagtgactttgaaagggtaggggagagggctctgttcaaaggttgagctgtgtcagcatggcccaagttcaagcccagcactacagaaagagctgcccagggtctctgcccagggtctctgcccagggtctctgcccagggtctcatgtactatttcctaaaagacatgggtttagaaggagcagctgcagtcatctgggccccttttctatcctctgatgctcacaaaatatttttccagttttattaatcccagataatctgacttgcatgttctgtggggtcattcccccaccctttttcttttccatttagaaaagtaacatttgagttcctaaaatttgatcaacatattttcatctcatatttattttgcatgagtgaatttagtcttaagaaatgacgtcttcattagcaacatctcaaccttggatagttaaacccacagtaaaccaggctaaggcttccgagactgagaagtggcaactttatcagaaaatttctgctgatttcacatgcatactaacttcccccatccttctctgctctatgctggcaggagaaagaagacattcatggatgttggtccacatgcatgcacaactgttgtaaatcaaacatcaattcacaatgcaagaaaggaaaacaagatacatcctagtctcccagcctgtggtttcatgtgcgtgtgtaaggtgccatcagtgtatagtgagatggagctgtctagatgccgagggaagcatatggcattgaaaatgaacagatctattcaagtctttaaaagttgttaaaatcacatttaaaatttattctctctgtgtatctctgtgtctgtctgtctctgtgtgtatgtgtgtgatggtgattttgtgtgtttgtgtgggacacacagagagagagagagagagagagagagagagagagagagagagaggagagagagagaggagggagagagagagagggagggagggaggggagggaggagggagggagagggaggggaggagagggagggagggagggggagggagggagggagggagggagggagggtgacttcgtctgtctttctctgtgagtttgtgatggcgattgtgtgtctatgtgtctttctgtccctctttttctctctctgtgatggtgatgaggtttctcatcttctacaatgtgagtcctaaggacataagtaatgtcaccaggccctgcagaaggtgtcttcaccctttgggccatttcgttggccccacattctttaaacatttcgagccttttgtgcacaaaaggctttctgaagatggagcaggaatgaaaagcacatggactagattctgaataacttaggattgtagagggccggccctcactgcagagatgcggacaattctgaacctggttctgccatctatgaggaaacacagagtggcctttagaatttggaagagaggcagcgaaactttggagaagatacaagttggaggtggtgttggattcaggacaggaaagaagtggggtctcactagagcctggtgagtgaccagaccagaaggacagttgaggaaaagctgagtaggatggggggggggcagaactgggggggggcagaactggagggggctctgaatgttacctggaagtgacttttataaaaagtgattacatgtaaagagctctgcactacgagcaatggcctcatgtgcaggcttggattttatttcgccaggtagtgctgcggacacttgagaatgtaactcacatactcaattgctgctcagctgggaagaggagcgcaccatgacatcagacaactggagatcgacttcctggggaaaaggcctgaaaacctttgctaaaccatatttcaaaaccttgtaataataattatttttttaaaaaaggagtttccagtaagttgctatgtgatctctattttttttggggggggtgttgagacagggtttctctgggtagctttggagcctatcctggaactacctcttgtagaccaggttggtcttgaactcacagagatccgcctgcctctgcctcccgagtgctggggttaaaggctttcgccaccaccacccagctaaaaaaacttacctagttgtgaaacttgcaagttagaagaacaagtggcctggcaagattcgttcactgatgcaagagtggtgtgaatgtcatgggagcaaccaaacaccttctaattggatttaagttctgtttcacacggtgaaacctgtaccgggcacagctgtgggcacaggaatctgtgactagctgagtggccatagtattcagtggaatcttgacttattgttatgtccacagattatgttttctcacagcccattagagacgcttctacttttagtagatggcagttgacacagagacctactgtagggagacactgtagccccgcctcctaggagcctggctccaggtatgcttgactatgcctgtgagggcgtggtcaggggaggttcaggaattcttaaggaggtgacagacgtgggagctctctctttctgggctccctagcctgctgcctcagggcactctctctctggcttgagtttggctggtgtttatctgaataaagacatcctaacccttataacctacaactggccaaggtacagagaatgagactatagaatgattgtctctaaatggaatgtctatactgcactctcccgttccaaggctcatggaccattatggaatgggggtggggtggggtggtgtaaagagtatgggagccagatgtggtgaataaatacaaggaaataatggcttccaaacaggacagagctactgcacatatgaactctcagtagttatgacagcctacatgagccgcatgtgagatcaagccagaccagacccaagcatggggaagggaggtggacacaaagccccacccttagctgaacaccagagtcattgggagaagagtcagtctccttgaagaatatgccggtgagcactcgggagagtggcccctgtacctctcctgggcaacacaacggagctggctgtaatgatgtgggtgtgggagagccgaccttgagagcgtgaaatcgggagaacaggctgcatccctggctctttgctgcaaaaggtgaattaacccggggtaatgctggatagctccccctggtggtgaggacaggggagaactagtggagggaccaaccctgcagccgcccaggcccataaccaggcttatgaactggcccgccacagcctctaccccacctgtgacctgaaggagcgcatgaagggatctgagctgcagacccaaaactataggatgtctaccacacagggcggcaacagggatcccagaagactctctgtgagggcccagatttgatggcgtagtagaaaccagggttcttgaaccagaccattgactctttgtcatgaacacttgcaagtaaagatacatggtcaaaggcatttactgcatgacccgctgtgtcacactgcagcttctgtgacaaggtttttcattttttctcttaaattttgtctaatttttgggggtggtgtgcaggggtggagggcagatgtgaaggatagggaaatgagtgggttcaagatacattgatggaaaagacacacagaataaataacaagaaagtaaaaagaatcatagagatactttataaactaaacttttagaaccaccccccaaaaagaatattgccattgataggtttccacaccccagtggaaaggcacagattgatctgatgagttcaggggaaggggaaggaggtcacaaagttgggtgggtagggatggggttatagatctgggaggagccaggggaggggtgaatatggtcaaaactcattgtatgaaattctcaaaaaaaaaaaaggcaaacatataaaacaaaacatgtctggtgagagagctcggtggggaaagtgcttcctgcatcatgaagaagggcctgaagtcaggtccccaggaaggagagacccaggagaggcagggtccactgtagcctcagcggactgtccatctaaaaggatgagttctgcattcagtgagagactctggctcagaaaaatgaggtgaagaagtactagaagacagccaacatcagtgtgtggtctccacatgtgtctgcatgggcaagcaagcaagcatacacacacacacacacacacacacacacacacacacacacacacacacacacacacacgggacacagaaacacacacagagacagacagacagacagacagacagacagacagacagacagacacagatagacacacacacacacacaaatgaataaagacataaaataagttttgggaaggtagaaagtgagttgaatttaagctgggtgttctagcctttgaatcataggtaccctatctgggcttttctatattgggcacatggctgtgtggagctagccacatccttgccccagcttcttgcaaagatcaaacatctgcaaggtacccagaaaaggttagagccactgctgatggctgggaagcaaggttagctcacggggcatgcaaataccaaagcattcttagggctgatactgactaaggctgtagaagtcagggcaagacctaagatctaggcacaggaccccttcccacatgactgtgatgtgtgccattgtaggcccagcaagggtcctttaccgtaactgttaatatatgtccaacttaaaacattcagcagttagacctgtgcattcctcaatgcctttgcttggctaaacatctacaccaacagttctcaatctgtgggtcgtgacccctttggagttgaacgacccttttataggggtcacatattagatatttacattatgattcataacagtagaaaattacagttataaaggagcaacgaaaataattttgtgatggcgggggtccccacaacatgaggaactgtattacagggttgcagcattaggaaggttgagcgcagggcactggcctgtacagacagaagaagtgtgataaggggagagaacatctcttctttccctaggcgtgtcattcgcctcccagtgagaatgggcagaagaagatgaagattcagttcacagatactttctttactggagaattggctgtatcgatcaataaagcaaaatctagagtcctcacaatatgcacaatgatacccattaccataaaaacaccgaggagaaaaagaatggcccgaaacagcgcatttgtcaaaggggaagatgagaaaaaattaaatttgtgataattaaattttaaagtggcaaatcagtcacactaaatattaaaaagcagcacttctgatctatcaaaattaaaaatgtgcatcgtctgtgacccagcaattccaccctgataatctagtctaggggaaactagaagaactgtggtaacatacatgttagagaatcttaccccagccagtgtgcagtaggtatgcaactgtgactgaacagacattcaagagcttagaggtgacaccctgctaatttcagaagccaggcctgagagaaatcacaggaaaaagggacaagctctcttagttctcttctacagtgagggaaatgggagcaaaaaaggagggagacaaggacggggggaggagggggaaggggagaggactgcaggaaattctgaagagaaggagacttggagaagtaccacttggtgtctggtcattggtttagcaggtaaggaaggtcctagcagaagctgtgcttgggataggatacacagggttccagcatagtgaggtcccagggcaacacagaggccaaatggaactgaattgcttaacgctctgagatgggaccaagcttagtgtttagctgatgggaatgtgtgcagagttgacaagatagggtcaaagtgatgggctgggcccgatggtgtgaaccctgtgggctgaacccaagtctgacaatctgactccaggttctgcaggaaagccagagagcggtaccatctctgtaggctcacaacgatcacctgggtcctctgtgacacagggggctgtgagtctgctcaggccaacaacaaataccacagcttgagtgcagaaaatagtctgtggtcctctcctggccactagcatctcatttgagggaggcctaacacttcactagaaacaaatgctcctgagtcaggtggtggcttttccattttgaggtctggtgagtctttgggggcactgtactttctgtaatcccacttccacgggaaaggctcattttctgagagagagagagagagagagagagagagagagagagagagagagagagagagagagagagagtgtaaatcatcctgttttagcatcaagaaggtggactttccctgggaacttgaaatgaaatggcacctagacacactcaccgcttctagagtctacttcattgtcagggtcaagagaagaatcaaaatctaatctgccatttgcaaggctgaggaaggctggaccagatcttgtcagcacaggaggtcccaactccaggccctcggcagtcctcctgcagcccactcctctctgcaggtgctccccctgctcctccatgctctccctgctcctccatgctctccctccctgctcctccctgctctccctgctcctccctgctcctccatgctcctcctgctcctccatggtccccctgctcctccatgctctccctgctcctccatgctccccctgctcctccatgttctccctgctcctccatgctctccctgctcctccatgctccccctgctcctccatgttctccctgctcctccatgctctccctgctcctccatgctcctcctgctcctccattctcccctgttcctccatgctccccctgctcctccatgctccccctgctcctccatgctccccctgctcctccatgctttccctgctcctccatgctctccccgctccccctgctccttcatgctccccctgctcctccatgctcctcctgctcctccctgctccccctgctcctccatgctctccctgctcctccatgctctccccgctccccctgcaccttcatgctctccctgctcacgctgcacccctgccctctggctctgtgcactcgcagatgaagcttgtatttggtgtaccgtatttggagtgcctttccatgcttagaactgatcactatctcagaaacacagatttaatgccaattccattttgaagagcctggcggcccagacagagtcatttccttcccttctctgcttgctctgttgttcttactttgcagcatcacgatttgtttacctgccgtctttgcttctgactaggtcttgcgtcttagaggacagagattggggacacagagtgttcttagcaccatatgggtgctcaaaagatgtctgccgaatgcataaattatcttttatttaaatacattatcttattggcaatatgctagctattttgaaaaaaaaggatatcatggcatatatctaatgttttctaaaccatctataaaaaagtctcctttcacaaaataactattttacatatctctaagaggaagaaaagtacttccaattaaatgtaaatataaaactttagagttttaaactttatatttgctgagacacttaagcttctatgaacatagatattgttttttaaaaaaatgacacacagcatggatgactctggcctattttgtgtttttgatagcttttaatttgataccagcatcacctttttgaagacaatttaagtggtaattaaatccagctctagcaatagtaccagcagtgagcacagctcagctggagtgacgtgtacagtcggccttgatcaagtctgtgtgggcacgagcaacgacaagcacatgacaatggccacccacctggagcacaagagagggttgtgtgcccatgatttcagacctggggaaatgtggtgggaaaagttcatcctaaaatacaatgtgatttcctgactttctttcccaaacagaaaatgcacaccctctactccaccctcggccccctgcccccaggggacacaggttcatttagcagagtgattggacttgtttttgtttggccacaacattcatgggaccacaagactagttaagaggtaaccaaagcatactgctgcttggtcagagtgttaacagccacgacactaatcaaaaccaaatcaacacaggaaaactcacaagtgatgactttcggagggtggagaatggggtccttaggtgttaggctaacaggcatggatgctctgaaagatacatctgaccactataagcagtgaccagttctgctgctttcaaactcacagctcaggttcttttccctctgaactcttttcctacaaagtggaagttcttgtcttaaagtgttaaaacacactgagctttccaagtcatatgccttatacacataccaacacacacacatacgagagagagagagagagagagagagagagagagagagagagagagagagactaacattatcttcatttttcaggaagaagatggatgagaaggtagctgaagcaaactgtccatgctcattaaattaccagaggccgagtgaggatttgatgggaggcatcagactgcagagtctgtgctcatgaccttgcaggcattttgggtgtgacttcatacctcttactgtctccactaatgacaccagactttgtaaggcaaagccattgcatgccacatcttccttttggcgaatcaagaaaggcctcctgactgctgtgttacccaggcttgcctactgagtagtagtcctttcccttctgaggagtcaggttgcacaatagaataaagacaaggagaaggattgttttagaaataaggattctgggcctggagtgagagctcagtaagcgaagtacacaagttgcaagccatataaaattctgggtgtggtggcacactcttgttatagtcctagcattagggaggtggagaaaggcagatccttggggctggctcaccatctagccacctctttggtgagttgttggccaatgaaagacccattctcaagaattaggtggatggcacccaagatgtgacagcttaggttgtcctctggcctttacaaacatgcacagaaacatagtcacaagcaccctaacacagacatgggcacacacacatacacatgcaccccagcacacacaaactcatacaaaaccaacaacttcaccaatggcttgacaatgaatcagggaaagcagacatgaagacaaaaacaggacagttgaggttgacagaacagccgtcaaagggaaagcattaagaactcccatagctcacttcttccaggctccgaagggttaactgtccatcaaacgttagacccggatggttggggacactttactggcacacatcagcagttgtggcatggtgatattgagttgttgcttgaaaaatattttaatataataggatttaaatttccccctttctttggatttttcggttaatattggaattaaattaaagcattaagtcaaccagcttagcgtaaagcaaattatgtcaggtttagcgctgagagctttggtatagcgtatctattgactcaagcttattaactcgtaaatcctctagttttagattatgatctattgattatctgcttttatttgcgttttaaatgaataaacaaaaaggaatgatcagactttagtcattataccttaagagaaaatgtacttaagctaagcatacttaattaaaaataaaaacaacttatatttgttttgagaactcactgtggtttttactttcatagaggtagatccatgggggttttaatttatacatttttatttgatatttcaacaaaacagggaaaaattctcactgacgacagaagggatgctatgaatttggtattttgggtgctgctctttttttttttatctttacaaacatataaaaatggattcctgtcttttaagaaagaatattgtctcctcaaagtcgtgtgctaacatctgaggaaagaggaaattttaaaccttaatgaaaacaagagttatttgatgacaatgactaaaactcaggtcttgggtttgtccctcaccccagggacactttagaaacataatctattttttctgagccttggtccctaacagtaacttcctcatgaactttgtgagaagcaggtgaccattctgcaagtgcctggcacacctgtcactcaagagcagtaatttcagcatggccttcctcctgggagcccctgaggaatcctggagttcccatgatttagaggagtagttgcttgtttggctttgtgctttgtccaaaggaaagtactgacatcagctaaagaactgagggcttccggagcctcagccggatatttttatttaatagctattcctttcccagcgtagctctgagcactgaagggagaagggaaggaacgtggcatgcacaaatcttagatcctacttccttgggaatgagaactcacattcctaaaactcatatacaaacagatggaaactaagcacagaaggagtattaggtaaagtccccaaacactgcacatggcatcattgggctttacatgtcaacatgcaggaacagtactagacccggaatcagatgcagtcaacctgtggaccacaggctgtatgcgtcctatgatagctatggatgtggcccaatgtgtttccaggtgacagtgtcatgtcatgggctcaggctgaatgatttcatttaaattctctgctgagcttagagaccagagtgaaaaagtccaatgtaaacctaagtgttttccttggggtataaaatatttacacggctgctctctcccacgttataagatctcatataatggcttacattgcaaagggtcctcactgagagggatgcaggagccatgggtacaaggagttacccgcaccgtggaagggatgctccgttatcatggtgactgctatcccagcaattgtgtgaacacatcatttacgtgggtgacgaggacaggtgaaggggagctgaaaaatggaagaatttcccttgtctcctatctttctttgataaccagacagactacggagcatgaaggatgagggctgcccaattcaaagcaaagcacgtagccaccatctgggcattttaaaagtaggacacatgaaatgctcagatgtatcccccaacagggtgcaataatacagcagtaaaaagaaaactgcagagaactatgcttccatgccatcattctagttcaggaaggggcaaagatttcccagagcatcaccgtcaagatatttggtgcatggatgcttctggtatctgatttgtgtggtacacagacatgccccatggaggacattcttctagcaaaaaagaagtctggccattctagagggtgggggcgggggttcaaaaatggtctttttagatcttaagcacaaacacagatacacccttctttcaggatgactggctactggagtcagggccgactttccaatgctggacatggcgttcagaggaagacagcatttagccatctctttcagacacttcattccctggatgaaggtcactgcattacttcagagttaggaaattaagattcctaaaactgtcattttgaaaagaaaggacatgaaactgggagcaggggtaggaggcagccctcagaggcgttaggcaggggatgggaatgagtgcaataaaaagtacaatgtgtatatgcataaaattctcaatgtattttagaattcccccagtcctcccccagtcctcccccagtcctcccccagtcctcccccatctgaatctgaaggtacaagttcagcttcttcccagactcctgtagatctggctgcccaatggtaaagcgttgctttgtcaggtggaaaataaaccttaaacttccttttctttacatatgcattttagagagcaggggtgggggaggagggagaaagggagagaacgggagagaaagaaggggagtttatcttcataggacttggtggcacatacacagtgtcttttcttgaggccacataatgaggccgtatggattaatgcacttccatacatctcagtcacattgaattatggaatcctaagtcctttcatatttgccagatcaagcaccttctcaggcttctcttgcctgggtgaggagagcagctgatgaaggctcagaaaacagcacctcccgctgccaagccctgggaacagctgatgaggatggtgactcctagggagaccaggctgtgagaagaaaagatgccctcaggaaacacgaaggggatggatcttagggaggtcatttgtgccagcccccacccaaacccccaagcccttctatttacattttcttgcctcttctgaaatcctaggatcatttaaactaaaactccctctgaactcgtttctggaattctccaatgagcccttgttcttattttctttcttcctttcctttctctctttgccttccttctctctctctccctgtctctgtctctatctctgtctctctctgtgtctttcctcatgccctttttaattttttaaattttactccttgcttggcattactgggagtcagtctagccattccatgtgtctgcccatcttgggatgaggaagtagcatggctgttaattggatacctgcagttcaaagacgggaaatgcagagtcgatgtctgagccctgcaatgtgctgacaacacagtgaccacactctacttcacaagattgcaaagccagccaccttgcccccttcacacctccctcccctcactctgcacttgactgtctgtgagactaatataattttttaagtgatttatttctaacagatgtgatcctctgcacaatgtcccctaacaattttaatttctgaatataataagcatccattctactaataaataattatcactctgctaaggacaaatgccaaggattacagcatgatgaccaggtcgcccagagctgaaaggacaaggtgtatctcctgaggctctgactgtgttgaagccagaagtgctaattacagcatttccaaaacatgataggccacaaaggaagaaaattagccacagcttaatgcacacagtgttttagaaagctcctcagttgggctggtgtttctcagaacccatccaccttgctttctgaggcagggtggctcactgacttagggtgctcccacgagatccagctgttggcaaagtctgcctacctcacttccccaggcccagatcacaaggccctgcctggcatttctatgtgggttctgagggatggaacttgggtcctcatggttgccgactgagccacctcttcagacccagaaagatactcttaggcatccctgtggctttttgtagatcagaggtaacacaagatcaggcaagacagcagtgcaggccctgggatagaggcctacactatcccagggtgatttatcagtcttaccacctagttattccacctagttattccaggggtgcttctagaatttcaagggcaaactgggtttgggtcttcattacttttcagagatcaatgctatttgttgaaagtctagtaagctggatccaggcattgtcacaaggcgatgttaatgtcataggcataccccatgacgttcaggctgtagttcaacatgacatgacatgacataacatgacgttagacaaagtaagctgcccttagaattgtagacccccggggtggggatgggggtattctcagtgggtttagtatttcaagttgagtctctgagatgcttcctgtaatttttcaatgagtgtcctgccttcttggttggctttgtctttcctttccccggtggcaattagatttgggggctagctaccacaagaccattctgctatgaaggagaactaatacattttgttaaagggacacagttttggggaaatgttgtcatagaataaagaagcaatgagaaaagatcattgttcagtttttgtcttttggaatggggtaatgattagcccaggttggcctaaaactctatttagcccaggctgccctagaacctcatattttctgacttagccattaggagactgggatcataggcatgagatgttgtgccatttttgttattttttttaatttcattgtggacaagtagctctagacaggacacatggcagaaaagtcttgcagttcctactgatgatgacttattgagttggatcaagtactactccttcctgctttagtcaccctgattggcatcaccaggaaccatctaccgactgtgcaaaaggggaggggtcacagccagtctccaagtcttgcttgctaaccacaggcccttggctcttgctgctgactgcctcccggggcagtttcatctgaggagcttcttcagacatcttctaaaagtcatcagtttgctgtcaacctgacaagtgggggtggattggaaaaatggcccctcttgtcatcctggaatagaaagtggccaccagatgtggtcaagctcctgcctgctgtacttctcttgtacaaactttaacgcacaggcctctgaaccatctggcccaagtgatctttaatgcattcaacatcttatacatcatttaccatattcattccacacaatgaatcataacacaccatgtggaatgtgtcgtcttctgtggttttcatcgatatttagtttttcataaatggcatgtcattccttcaggcaacagctcaagaggtgatgctgagcaggtgcaagaccctcacctaaaatcagatatagctgcactggctatgtggccttacaattttactcaacacttctgagtgtttgtttcctcacaaagaacacattgatactgacactgcatggtggtggggtggacaagatgaaatggcattttgtgaagtgctcctgtgctttatattgacagctcttggcttacaggtggaaactggaatacaaagatgatttagctgcaaacatatagctctccttctaggataaaaatacagcattactgagcaattaaaaaaaaaaaaaaacctctagaatataatagtagcttgggtgtggcaataggcaagccacttcttaatgattggatttcagccactcattaattcatgattcactaacaaaggtctttgtaacagtgacactgctctgggcactggagagaaggggcccatagggaacaacccctagtcttcaggttcacactcaggttggggagacaaacagaaaacaggatggaaaacagaaacgtgtcaacagatgaagcccagtgctcaggagaaaaaagaaaagtgtgggctgggcagtgggttcagtctgtgaaagtgcctgccacagatgcctgaggacctggagtggctaaccggcacccactgaaaagctggatgggtgcagccgtaagtgtctccagctgcagcactcagggtagggaaagggacaagcagcttagaggctctcacagacagtcatcagtgagctccagcagccaagagactgtcaaagagggagctgtgaggcagaggcaggcagctctctgagagttcctggtcaggcagggatacactatagagtgaggagacgctatctcatatattgttttttaaaaaaggtagagagaaattgacaaagacatccaacataacgtatggcctccacatacacacaatccatgtacacacatgcgcatagccatacaaacacatacctatatacaaagaaagcaaaacacaatatttagaggaaagggcagggaattgtggctacatgggcttggtatggccttgctgaaggtgagattttactcaaaatgtatgggggtggcagcaagacggctttgtgggtaacagtgtttgccgtgtaagtcttgtgactggagttccgtccatggaactcacgtaactgaaggagagaatcaaatacacaggtagcctctgacttccatatgtacactgtggcatacatgtgcatgcatacaaacaaaccacacacacacacacacacacacacacacacacacacacacacacacacgtgctaagaaacggaaatttaaaacaagtatagcaggcagtcataagcctacctgggtaaagtacattccagacacaaaatgctcccaatcactctccctgcccttgacacggtaaggaggcagtaacttaaggctcctcatgaatattaatgttgcatgcaaatatagtatgctttgtttcctgggctgttcttttccctccttttttctttttctttcttttcattcttcagtttaagggtaaattaaacaccaaacctttccctttggggaaatggaagaaaaaaaaaaacaatacatagggcttaaaggaaacaggaattaaaagtgccccacacacgttttagatgcatctccttgtactagggttttctcctggaagtttaacttaacagactatatttctagtatcagtgaaagctgaagaggttgacagaatgtatgcagacatgatctatgtggggtggttctgattttcaaggattttcatttggtctaataaatctgaaaatattggcagaattcaagtcttaatcgggatcttcaatgtgtttattaagggaataagaatagactgcttttaaatgctgtgtccacattaatagggctgctttcttcagagttgcagggaaaattacactttgaatactagttactgataaggaggcaagccgagtcctgtgtaccttctggccaacgacagatgaaattagcaaggtcgacaggcatccttggctgggaactggtcactgtgctctgctccaccctcctattcatgtggggggtgggtagaagggtgcaggagaagttgttaagtcagctcacacgctcacacgctcacaatgagctttggagcttacctttgctaaccgggtgagacaagaggattagaagaacggactagtaggactcttcggaaaaacttccggagggttctgcacacttgacattactggaagagttttcagtgcattccatctttctgattgagtcctttgtatgctggtttggctgccgttacgtttatgtatttctgacagtgttcttaatgacacactaacagattgtaaaacacgctgctggcattgacttgttttttatatttttaaaacaatgtccttcatgtaacagtagttaagcgcggcagaaggacatcattagagccatggttaaactgtaatttacaccattaggaaggcaggagcaatttttattgcctggcaattttcttgctgaaatatttggaccatatggctcaatttgtgtaataaccttaatttctgcacccttcaggtctgcctccatctcccacggaatggtaaaatgcgctttaacagaaaaggcaactgtctatacttagagagttgagattaataacatgtcacgtcctgtttttggtgaaggaattcgagcagcggccagatggtatctctacaaataactgtcaggggtcttgatctaatcaatacaatgtattaatacatctccctttgctgttcctccaggggctggcacagaacatctggaaggggtgggggggctgccgaggagaaagccgattcttttcagaatcaaaccgagtccaattaatttttcatgtatccttgataactgtttcataatgagctgtgcgtcttgacggatttggggttggcagagcccggctgccctgctttctatccccattcagtccacttatagaaaccaacccattaatcaagctatctggcataaaacccgaatctcagctcagcaagagatcaataatatcataaaaaaaaagaaccacggaaccatccgctaatgggcataggtatccagccatgactttagtaattgctcgaacaaaaataaaactctgggtcataatcacccaaaaggaacttatatgataaaattcattacttgtgtcttgtcaaaaggtaacatttacatctgttgaaaatatactgtcattttactgtctcgtctagcccattatcttttagggttagacaatgttccccttagaatggattaaaactctctgatttggtaatgtgaatatttaataatccaagtatcatataaaatgtttaaaaatgagttattatgcttcttttaaattcagagtgcccgtggggcttcttcgcacgctctttagcctggctgtgtaggacacgctgctgtagatgtgatattatgtcatcaggtctcttgactctggttgctttagtggtagcatttacaatttaacctacaaatcctatcactgggacagtttcattctggacctattatcttttacctgattcccgaagctctccaaactctctgagctcagtgggagctgatgcactttggttctgttttcaaagggccctcggtgactctgtttagggaagagaactcaatacaacttagggagacggaggaaacccattatctgcttggttaaaacattccttattggctctcagacaacaagtggaaacctgttccatccctgggagatcctgaggtactaattagaaaaaaatcccagcaaacactgccaaaagagagtcattcattggcagatcccctgaccaaatcctgccaaggtgacagacaggcctcaggagtcactgaggagttgaaaggtgagctcccatccatctttgaacagtgggaggtagagtcatgaagcccctgcttgtggtttgtggtcacgtaacatgggtgtgtgttgcctggggagctgaaatcaggggtgtgagtgaaggtcctccttcgttctttttaggcatttgtgatcacagtcagtgcttagtcacggacaagcaattgcttataattaacgtttcctgccttttattcttctccagctttaccagccagcctagggaatcagactttcccttcgtatctattatagtttcgatgtgcagagtctcagtagaaacgccacacacagctaattaatggatgagccccacaatatttcttggtcatgagcgtcaaattagatctgatgtgcctcagtgttcaattgcaaatagcatgtaattttcatatattcatgagatttcaaagaagccattgcccagattttcagctttcattttgtttgttgatgtctggtatgcataaatataaagtacaccagctagagcaaattcacagagacttttgacattgccaagacagaaagctactgaaagaggtaaaccctggaaggatacctaaagcctctgattcatattgcctggcttctagaatcttcaatcaacacactatcatgatcaggataattaatttatgcaaacttaaatcctctaagacacagacagaaaatatttcttctccttgtctctcaacccatagactggatcaaggaggctaacagcctcagcttcgtactagccaaggaagatggtcccaagatgtttcacctcatgaaatggtaaggggataaaaagattcatttgcaaacctatcacatggcactcacaggtggtgggtgtgggtcattgcatttggattaaaaaggaaatgtctctccctccatgagaggtcagcagctgtgtaaggcgaaatcttttcactgttcagcatgattagaatattccagcagtggttccagtaatttagaaatcacagtattgttgtaatatttttctaggcttcaggagctcacaattgtttggcccaatcaaatcggggaacactagagaagttatcacccatcaaggtaattactttcaagttgaaataattactctatcaatgttaatggtctttcaacttcaataaagcactcacctgccgataatcatggctaacctcttgctccactgcaattccctctctatttagcgggttatattacagccgttacagtggtcacttgtcctgaacagctgctgactttcgctttgatcggctgtgaaccataaagaattggtcatctgtgtatgatatcccctcacccatcagcccttgcagagccgaggaggtgactgcagggctgtgatggggttcttcaggggcagccatcttgtctcaggtagtggccactttccactggtgacaagagccgagtagttcaattaacttctgcccttcactgtcatttacagcttgctgtctctgctaactggcatatattctgaatttatagtgtgggcccatcgctgcgttcatcttactccctcatcagttgtagacaaggcttctcggggcttcttgggcatttgagtggtttctttgttaacggagtcaaaagctagaaagaagccccatacttggctcaaaggcctctgagtgtccccaccaactgtctcctgggtattgagagcctgctatttggcaatggtaattccaatttgtgaggtgtggcagtaagtatgggggtgggtgggtgagctctagatcctgttaacatgggataagatttaaggaaggccagggcccttcaagtgtcacacatggcaggtaaacagttacctgaggagtagaactcttaggacaggcatgagatgctactgtgtcaggaacagcaaacatatactctgggagacgcacagaacagattcttgcttagccatttacaaaagagaccaaatcaagtctggtaactcagggaattacctagaagttgtaaactcaaaaattttgttgcagggttgggaacagatataaaacacggttttacacttaactgccaattagtttaggtgtttttatacgaaccacaactttatctacatttgccaatttagttcagccttgctaatcgaagaacgtcgaaagtttcagtttgctattgccattcaaagtgctgtaatgcaataaccctgtgagatacttaatttagtacagactgtgagtgggtaaggacaaggctatcctaggaggaagatatgatgagggtggagattccatgtgataccagaaggaatcagcacacagtttggaggttgactctggaagatttagggagagttgggtatggcagcagggaagaggtaggccttgagatgacctggcttgagcagccagagggatggtaaagcaagttagttgtataacagtatacaaaaacgaatccaatgtggggcatcttgtgtgaagcttggaaaaacaagtggtatgagctggctgtggtactggtgtcctgtggtactggtgtcctgtggtactggtgtcctgtggtactggtgtcctgtaagaccaaagctggaagagcgcatgttccaggcctgcctgaactttgtgagaacttcgtgcctcgtcttcctatgtaagagaagccatgtaaaagaatatctaagcttaggaaggtgaagcagggactcaggtaagggtgtttggaccaaccttggcaacctgagctagaacattggttcacatggtggaaggagagaactgattcctccaagttgacctctgacctacacacacacacacacacacacacacacacatacacacacacacacacacacacacacacgcacacacacactagaaaaaatacacttatataaacacaaaataaataatttctttttagttgaaagcatgtctgagctcacgaaaaaccaatcaaaaaggggaattcagttgataaatgagatcactggctatttcctttctccctgggggaaggtatagagtggtttttcccaactctgtgaaggcatatgagggataaatatatcagagtcacttgaaggaattgagaatcccaagaaaggagtgacagacggtcctctcttggcatggggtttcccactgcaaaagaggctctatgggtatttcagatctagccacaaggatggagaaggatttttggaggttcttaatgcagttccaggatttgatgatcatgacccaacacataagctgacacaggtttcctgttcaaagacctctgaagttgaggtgtgactgggtcacccctcagagagtaggtaattggcacttgatagggaagattgccatggaggagacacgctttcatcacttggtaggacaagggttctatagatctcatggctgctaaggaagcaacaatgtgacaggtcaggaagttgactaccagtagggggaggggtggagtagaagctgtggggttgactgctagggcagagacagaaagggacgcaaaaccaaaaacaaccaatcagatcttccggccagcccccgtcagaggaatatggggcatgggagttctcatggggtcctgtacacaggaaaaatcccacaaggcgtctgcccttcagtggcagtggaggatgggtgagaacatcactgctcgttcttacataattcatctctctctttcctcctcccttcttctcattccctcattcccttcctctctccttctttcctctcctcccccctttccattattctgaggagatcaataaaagaatagaaaactaaggaagaggcacataaccgtgatgtagtcttcattgtagccttctaagcatagaccagcagatttagattatatgcttggtgcttgtcagcggagaacaactcaagggcaaaccatgggacccatctttgctattattgatgagtagacaagggagtcttagtggagccagtcagaataaaatacaaggaacaaaataaacttttctcagagaagtagttgaagggagatcatacaaagctagtgaatgaaaaggcaacatccaatcaaatacattcttacaacaagcatcactgttctatgtgacactaccccacctccacgccgcatctttcatgtgggggtttgaataggaatggcccccatagactcgtgtgtgtgtgtgtgtgaatgcttggcccatagggagtggtactcttaggaagtgtggccttgttggaggaagtctgtcattgtggaggcggggttcaaggtctcagacgctcaagctatgcccagtgtggatatagactccttctgttgcctgctgatcaagacgtggaactcttagctccttctccagcaccatatctgcctgcaggccacccacaatgatgataatgaattaaaccgctgaactgtgagccagccccaatcaaatgttttcctttataaattgtagtggttatggcgtctcctcacagcaacgaaaccctaagccatttcatataatggaaagaatgacccagctacattacaaaatgtgaaaatctgtccctaggacagacatgctagggagtcttggtagagctgccaattttttgcatacccttgtttgtcatactagaaagagatccttctagaattcctttgaatgggtctgcagcaggaaggccgacaaccatcacactgtcacagccacaactaacttaagatcatacgtaagaagcagtaatattttacattacaataaaccaaaacgaaaatggaactagaacgagttcatccatttactcacaaaccttccataatagggcaattatgaagtacctcataatgcgttttggctacaaatctatttaatggtaaagagatctgtgccaagcacatgaggaagttttaaatgcctccaccttgacattgggaaagggagtttggcaaccagaacgtggagactagtgttgtaattttggatgttatgcccagatgaaaagccaactcttagtgacccaaatcatttgctcagtccatcagccctgtatgcgtgactctacatatggagtgagataccaatctatctttcagggcactgggcaaaggtatgttctggagggcaagcagggacatacttagagcactaactagcaggcaaacacttttgcctttaaatcccaagttatttctgccagtacgatggcagatgccaatgtgatggcaggtgccagtgagcaaaagcaaacagacctgagtggtggtggcagcctcgccagcctcgccaggagtgttcctgcaagtagcaccatggaactcttgcatgccaaggaggctaaattcagcctttctcctgacacggcaccatccatcacagagctaatgggggaagtaagtcgaaggacttgtaaccgaagcctgctttcagcaaggaagactgcaaagatctgaagacaccctaagaatgttggtcttttcatttcagagagacctactcagactcagagagaaagagatgacttttcatgatgttaggagagaaactagtgatgcattaagagccacacacagccatttctcctctcctgctgcctctgctgctgcggctgctcctgccaacacatccactcttcacccccgtggagggcccgatgcctgttctccgctcagtgccacctccagcagggtgcagggctccatcacatctgcttcacacggctctcccagcaacctccacctgcttctaaacaactctggggggacctgggcaagctagggatgtgttttccaccatgggtgatattttggtggtcccttgagtagatatgggaccccgataaccaagggactaaattagtgacattagggatgtctttcacaagtctgggttgatttgtttttctgaaattgtgtgttcacactcagtgcttcattgatggtaaacatcaactctttgctgggggaaattttagcctaagtagatccaggaggattcttggagcaagattgaaaagggagtcctgtatgtacgcccagatggaagacacccagtagtgaggggcttagaagccttagtgcccaactaatcacttgtacctcacgcttgaccacccaccttcctaccaagccactgttggactcaccctcacagtaggccccagcagtgagtacttataaagagcatggttctcaatgactgtttatccggtttaggtgctgaccctaaagattttttttgcagccctataaggaagtcatgttgttcagaaaacaaaaagaataggcttaaagaaaacttgtagttcacactgcattaggatttgcatctggaaccccaactcttgccagtcatgagtcacagtgcaagaacaggtgtcatacaaaaacccctgcacagaaaatgccctaggaagtcaacaggaagcacccaggctagagacgcattcatcatatccttaaatcatgcattttataatacaaccagctaagcagggacccacaaggtactctcctaaaggaattccaatagaacaaaggtttggtcattcttactggtgcctttgatgaaattatgtctgtcatagtatttcagtattttaactaaaattactttacagatggtgaaagattagaatacaagttcttaggatacagttttcaaaatagaagatttccctacagatggaattattagctaaaacagatcgtttctatgcaatactatggctcataatgcttatgaagaagtatattaacgatgaaatggaaagatgctgataggaaacgaacattgaaacatgaaaacaaagcatcaattctgaagttaatgccttctctcaaatgctgcttatggttgactcacatggatacaataaccacaagcatggccgcaaaacgttagactctaccactcacaaagattcttcttgaattacatgacaacacactgacctggtatgatctatccatcttgttaaacatgaacgccttaacttctgcataaattggacttccatagcttgaatcgaagacacatggctttagcttttgaagtaatactcaatgctaccccactaatcttatttgtaagggtcatccacatttaatgatgccgtggtatattttgaaaaccatgaatattggctttctaaaaccctaatgtttaatcttctccatgagggctctctagcctgggagcttcctgtagacttcccagggcattcatttcctgtgcagtggtttttgtatgacacctgttcctgcactgtgactcatgactggcaagtgttggggttccagatgcaaatcctagcgcagtgtgaaccataagttgtttgggtttttttttttttaacctgtagttctcatttctacaattctatatgattgtttctatgacaaaaaactataacatttctgaatctctcatagaacacaaggaatttctgggcataaagaaaactcccagaaaatagtaggtgaactaatgaaattattttacccatcaggggaacagttcagaaaagaatgaacaattccttgttagaatatatgtgtcttttctagtgcatggaaaattattgcctttgtctctgcatgcatataaacatacatgcatatataagactagtccttgacaaaccagaaaattgcatgttcttattttgacacccttcctatgcaatattgaggaaaatactgccttattcccatttagtgggtctgtaaagtggtaatcaggcaaagagtttcatttatttgcttgtagtaatacaaataagttctggtctgccagctggtccccaaatgctcctcatactcaatttattatcttatccctaggaccatattgctgcctttcaaatatgaaaaaaataatatatttatgctgtaagtgaggaaaatgacaaatagataaggaaatgaattttaacctgttaaccagataatccaagggctggttatttattctaagctcttaccgtcactgtgacagcacgcactgtagagctgctaggtgttgcctccgctgggctttcttggtagatcacatggtactggaagatgacgccattggaggcttcaggctctgtccagtttagcaggactgaatgagcactggtgacttgagcccatggtgccgagaggccttgtggtggggcctccaaggtctgcactgctgaccacagactgtccaccacacccttggagttccaggccctgactcggtactcatacagtgtgaagggctgcagcgtgtctgtgtcatcagtgaactccagagctccttctgaccagaggaagaggagagactcctctttggtgtcagcaggacgtctgcaagagaaccaagcgagcagcaagcttgtgacagacagctggacattttacaagagctttagacacagaggaagagactggtggtgagagtttctcccacctcatcttggttattaaatgagtagcttctttctgataatttttcctattaggaatatgctacattttcttaatgtagttggcctgtgtgtgtgtgtgtgtgtgtgtgtgtgtgtgtgtgtgtgtgtggtgtgtgtgtgtgtggtgtgtgtgtgtgtgtgtgtgtgtatgtgtgtgtgtggggggggggtgtggggggtgttcctaaatgtgcatacatgtcacaggaaacatgtcaatacaaaatatataaaaacttaggcaacatgttactgtgatggttaatattgtcaaggtgataagctcaggagacaaaaccctgggcaggtctgtgaggaaacacctagcttgggtgaactgagctgggaagaccatgtgtgcatcaaggggaacagctcagtaagaaaatcaacatcgtgttagaattcatgtgtcttttctagtgctgggaacattattttattcctccaagcgaggagtaaatcatgggcgtgtgcacaacagtctttttcaggctctatctgtgaacccagaaccacagaataggagatgcagtggctggacactggtgttttgggaattcccactcttctgtggtacggggactgcagtagttccagtgtgggacgcttttatatgcttctactcgactccagctatatgactctctttggctaataggctgatgactgatgacttttgtggctgcaaagcatttatatagtgaggctgactctcctgttgtgggatttaggatcactatggccaaacacccagacggttctactgtggccagacactggccagagaacccatagttcttcccaaggtttacctataatgatgcaccttgcgtttgcctgcatggcagctggacagcatttccatgtgttttttttttatatgctacttattttctttccattgaaattttccattcattacaccataaccctcaaagcaagaagtgttctcattactgttttttatacacttgttatcatacatcaagagccacacataaacaccatctttgactcaggatcagggatacagacatggaggaacctactatacctaaaggagcagagttgactaaagaaacagctgtatgaaaatgaatgaaaaccacatgctaagcactgtatcaggaatttgagttacagacttttcaagggcaaagggcaaagggcaaagggcaaaggacagttttcttttggatgtttcctaaaactgatcacagtccaggacagtctcaacatattcttttaagctgccagagaataaacttactcagtcctctagtacggttgagattttgttgctatcaaaactcatatttacgcattttctttctgtgccagacatacaaaacatgaaaccctgaagctagagcaatgaaatcatcagttgttaagatagtcttagatatctgatgttgagttgggagcgtatttttctcctccaggtgtaaaatcacaacacatacctaagaggagggtaactgtgcttttttacatctccatattcccagtgcccaagtccatgaaggtttcaagcatttactcttcatacaaggggctgaaagttacataatctcatgatattttttcttgccttttgacctcatctttgtcaattcttgtatctttttggggtagagagctaggctgagaaagaaggtagtgaaaagcagggctctcctcttctagctcagtctctggtggagaagagtgttgaataaatcaatattttccaggctgttagaagtctttaattaacaccctcttcagacgccagggaacacacatgctgccatatcagattaactggccccatcaaaactcaaagggtgattaagacaaagcaaatgacagtatcttacacaaagtagaagcagggtatgggaaatctttggtgctgggaggctgatgcttctccagccaatcaatcaccgtggtgcaaggatgagcagtgacaagctagagaagcatcacaggtccacctcactgacctgcagtttcattatgacctgctaccactcatgggccagattctgcactccatggaggtgtgccaactttggccccggtgcttgctgcatgtatgtctccagttctgggtgtataatggagagggatcagctctatgagaatccagggctcacagccatggactctggtcagcattctaaaagtgtatctgctagggatatgatgcaaacctatcaaagtcctatgggaaaattagtttctatttcgtcttacatcagactttctgtgacaattcaattgatttttattaagcatctcatgaattaccaaattgagatgtagccgttgttttcataagactggtattaaacaaaccactgcctgagggggaattttaaggtagacagtattttagacatgcaatatgatggagacttcacgtttgttcatcaaaacaacgaaaggatgttgcctggtgcagtatctcttactattgattacttaataaatgaatattagagaagactgcattgcatccccatgtggtgttaaaagtcaggcttccattttgtctgaacacacccagagaagaggttgaggaaacatttcccccctaattacaggacatcaaaggttggcaggagaggccctgttcctccagactagcatgtatgtacagattacacgttcagctctccctggatagccacgctgctgttcatttcatagagcgtgtttgggcgattcgattttgaagatatgtgatttaacttgtctaacactatgaggagaatgaagataaatctgaatctgggaagtatgtttttaacagctgcttattatcgttttgtgtacaaaatgtcctctctaaatattttaattataattattacatagcctagacattgagatctccatttctgctttaccaaggagcttggtgttgggttgtgccaacagtgggcagcagagggtgaccaagaagtcatggggaagggggaactgactgtctacttacttgtttcctttaggagctgttactgtgagcatcttggcagcaagggatcccccacttgagaggagacgtccccactataaagttgtctaatgtgagaaagcagatttgctgtttcctccccgaagagccagtgccagaaacaccctactaggaattccgagacccagttgcccagagtcctacccctgggtttctctgttttaataattctgtccacttcctttgttccctcagccctcagggtaccaccagcttttgtacagctgccacttacgctgtcccggagttttcttctcatcttttaagtcacccaattaacacatttatcctgtgtggctatttacattaaattcctcctgttaaaggcaactgggctttcttttctttctgattacaccttgattgctacagaaagtgatggtgtctatagaaaggggaaataggaaaatcatagagtgatggcagattgcatctggattcataaagttactcttttgcctttactattccatagcacaagttgaatgtaaaaattagacaataatagatgaacaataggaggatttaaaggattcttcatacctgccacttgagataagcacaattgttgttattttcgtgtctaataatctagacacttttcctctacatatgagtgtaaagaaaaatccaactttcttaaagaaaaacagaccgagtaggcacttcttttgtcccgaagaacctttgttagttcttcaataacatccgcaactgccagctccagcttcctgttggtgctgctttgcatctaacacatcacttcacatggatcagctcactatttcttacataactgtagaggctaattaccctctacatacatgagcccaactctgcataactttaaaggtgactcacccaagaagccactcaccatgaccaggaagtggcaaaaggcacatcatttgatcgcagatcccatgctcttttcatgatcatactgtttctttattttttccaggttcgagagcgcgtgcgcgcacacacacacacacacacacacacacacacacacacacacacacacacacacagagagagagagagagagagagagagagagagagagagagagagagagagagagcaataaaacccaaacaaaataacaacacctcaattgatcagcctgacttgttaaagtcttccattaaaaaagtcaaacattccagtgatctaagtttcttccacaagtagtttagcctaacatgacacttgcttcaactctggcctttagggttgggatattttgttattctatttacacctaaaatgccccaatgtcagcttatttaagatatatctactacagtgtgcatgcctgtatgtgcatgtgaatgtgtggtgggtgtgtgtgcaagagtgcacacatgtctgtggatgcatatacacatatatatatgtgtttacatataaatgtgtgtgtgtttctaaaaatggactaaataatgaattttgaattggtggtatatcagattaataattcatgaaatactgtagagaaacacttttactttatttttgttttttgcaaggcagggttttattgtgtagctctagctgtcctggaactcactctgtagaccaggctggcctcaaactcatagagatccacctgcttctgccttccaagtactggaattagaggcatgtgccaccacaccaggctgagaaattcttttttaatgaagacctggaattcttatctcgctcctgctaacaaaagtaattccattcttagagataagaagagtcatatagagctggaagaaataatcaaagtgttattttaaacatgatcacaaaaagatttacttcatgatgattatagactaaaaaacatgatacctcctttagaaaactatgacaaatataattattttaaatttaaattctttaattattattcatatttacatatccatccccccattcccttgccctcccatcctccaatgttccccaccaaccccccaaacccacccccaacttcttcctatggctagtgaggccacccaccggggaccttcaaagtctgtcatattgttttggggagggcccaggccctccttgctgtatctgggctgcaatagtatccttccatagggaatgggctcccaaagtccattgtgctctagggataaagactggctccactgttagaggacccatagactgtcttggccttctagctggcacccacattcagagggcttggtttggtccaatgctgtttccccagctttatgacaatatgacaaggctctccatgctatcagtaggtcagtccactgtttttacaggtctctccagccccatcttggctcctttgctcatccctcctccctctccacaactgaatttcagtagtatggttcagtgcttagctgtgggtgtccgtttctgctttgaacagcaacaggatgaagggacaagtataaattttaaagaaagattttatttctttaaaattttggtgttgtgcctgcatggatgtctgtgtgaggatggcaggtcccttggaactggagttacaaacagctgtgtgatgggagatgtcattctgtaaatacgtttctcttattggttgatgaataaaacactttggacaacggggcagcaagataggtgggtctaggagatgaggagaattctgggaggtataggcagaatggaattatcatgtgagcccagggaagagaggatgcgagtgaggcgttctccggtaagatatgtggaaatacacagatcagtagaaatggattcataaataagacggagctagccagtaagaagccctagtcattggccaacagtttaacaattaatatagtgtctgtgtgttcatttgggcctgacatggctgtggttccaggctggtgggaagagcaatccattacagctgtgagctgccatgtgggtgctgggaacggaacctgggtctgggtcctccgcaagagcaaccagtgatcttaacccctgagccatctctccagcccccatgattattttttatgtaaaagaaaaacatagcatattcttgttagaatattaaaaagattggtgttacatctacttatagtgattatacatgtgttagctatgctatatggaagatataatgagttacgcaaccttccccactgctgtggttaaataatactcatccctatcaagcacatttcttttaaaatttcaatagtcaccaggttcttattctggaaggaccagtcttaataatgttgacagcatgaaacattccatgaatattctaaaaataaaactattctcatagtggtttgaatgaaaaaaatcccctctaggttcatatatttgaatacttggtgtccccaggtggtgtcactctttagggaggttatggaaccttaaaaaggtacagaagggtgcagaggggtgcagaaggacgtatgtcactggggtgggctttcaaagttcatagccttcctccactcctagtgctccctctctcccttctgagcttaaatatgtgatctctcagctttctgctctggtctcctgcactcacacatccccagatatcatggacccccctctagaacataagccccacatgtccataaaccacttttggttgcagcgttttgttttttttgttgttgttgttgttgtttttttcctcacagcaatggaaagtaatgcatctctaggttttctgatgaatatctgtgtatctcacatcatgttacacatcacactttagtttagtttaccttatatagcaataaggtcattagtaggaagaattagggtttaaagagctctgtgtcccttggtgtgtatagacttatgtgtacatatctagctgtgtgtcccttggtatgcatatacgtatgtgtacatatctagctggttagcatttaactcaatgcccatctctgtatccactttttccacacgcctttgattgactgggtacctttcctcagttagcctccttatctgttctgcacaatcatttcagtttccttctttaccttcggaactatcttagattttatcctttaaagtccttctgaatattcagaaggaagttttaccattttgttttcctttttcacagtgctaacgtgtctttgtatgcacttttgacttctaatgcatgcagatacttcaaatattattattcatttagagggggcgattcatgagactacaaaaccctatgtaatttcatctgtatttacatggaagttcctagtgggaggaggtatttttactaagtgttttgtcaattcctaagaaagtatctcagatggattttgtatgtggaagtggtgagagttttaccatggataaagctgatgaagtgtgtagcctgaaggatctttgtatgaaccaacctctctttgaagatgtgagctttcaagttggcttttcttgtatcttggcaatagataagttacaaaccactaacctaaccaacctcgttatttatgaaaacgcttacagaaaacttcctttatgccttgcatggagtcaagaaagcagcctatgtaactggaaacttcaggcgggacattcttctcactaataagttttaatgatttaagcggggaacatccctcaccgactcaggcattaggacacctgacctccaactgggggcgttgttttgagaggctgggaacctttgggatatggggcatagctggcagagatccaggcttaggagcagggttgaaggctgagggtgggttcagcttctgcttttcacctgtgctctctgcctcccaatccactgagacatgaataaactacctcacgccactttgtctacctgaacaatgtcattccttccccatcatgaaaatatgagccgaaataattcctttctcctctgagttgattctgctgggtattttttcccagtagtgagaaaagtgacacatgaaccattttgctttgttttggggggtcataaacaccttacctccttattaagggaggcacttaacttttttttttttttttaaacagcatgatatgtagaagcaacatgaagacaatggaagagaatggcagaggggggaaagtagtttgggggaccagtgagaactggaagaagcattttcagaatgagataggcatgtgggtttccagtaatttaatgagagtatctgcataggccaagccttgtctttgctttcagttgaatgcatttcctttggtgacagaggaaagcaggctaacgatggagtaggaattatatcattccctcagaagcactgcaggcctgagctgaagctatgtacagggccctgcatagtcacaggatgaagaagaactgtgtgtctacatgctatttctgtccttacaaatttctgattttttttctgcagctatctaagaagaatttgatattgttgttgtctaagcacatttaaacttcagctggaataactgccaagtgattcatgcctaggcaggtgaatataacgattgtatctggagccccagtgcgccattttcatttcactttaaataaaaaacaaaatgtatctatgtcagtcagtgcccttccgccgtactcagaggtatcaaacaggctacaattatgatggtgaagtgattgtgtcacactgggggaaggtttattgcgttggagtctgctaggcagtaacacattctgtttcatattactctttatatcattgtttggctgtgactagaataatcaaatggcatcaaatgctgtcaaattcaatttacagtatttttcattgaaggagcctttctgcattctatttcctgttttcctttgccggagctgccatgggatagtcactgccatcacgagctttgtttacaaaaccaatagagggaagccacatcctgctgtccaagagccatctatgtcccttccttcagaacagaatagggcacacctttcccatgcaattagcactaagcaactgaaagaaaactgtttctggaggacgggtaccttagattctacatgaaagtgcttagtgtaaaattcaaatttgtgtcagccatttttatacatccacatgtcttttaatcagaaatattactcttcgaataacattttgctgggaagttgggctttcttgttttgggtaatgccatttacataaccagaaatgcaaccatagtttctcctttcatgtttgtttctcctacagacacgcagctgtcagtgaagggtctgaattaaaggggtccaatgcctaaagtcactgtcactgaaggtgtatgctacatggaccaaacaaagaagagtggggaaagctggagagactaacaaggtctgagagcagcgggtgaggtgtggcacaagtgtgcagctgccacagatgccaagcacacaggatctttgcttctgaccagttttgcttttagcttccttctctctctctctctttctcgctctcctctgcttcttgccccctttctatctcttctttgctttctcatccttccctccaccactccctatccttcctcaattgttcccttcgtgctttctccactccctctttttctgcttttatttcctttacaatagagagatccatgtaataaattctgcacatgatgaggagaaaagcccgcacatataccattaggcaagcaagaaaagaggcattcaagtcgaatggggcggggtgggggctgtggcttggactcagtgtcagaacacttgcttagcatgcaggaggccctggttttgatacccagaattgcacaaacacaaagaagaaaacaaaacaaaaaaaatggataaaatgagaaacaaagacagcaacacttgtggggaggagtcacaaagataaacatcatgggctctagggtctcagctgtcaaagagattacaacataaggctacacacagtagcagtgtcagagttcatagcttccaacttgggccacatgggtaagtaaggctccatatcacaggaatgtacctctgtcccctgtgcacgtggagtaagtacgcgtgtgattctacagccccgcatgacaagcatgacccaaccacgaacctctcacctgtgaaggacgtagccggtgatgactccatttggtcttttaggtggcatccatttaacctcgatgcaagatgaccccagagccttcagaagaggggaacttagacccacgggggctgcttcatttgttctgacatatatgctactgctaactccacagcctcctagaaaagcaaaccagggctttagtaatttatccagcaacacaaggtgtcacacagccatacaggagggtactcatgccatgaaaataatctatctggatacattgcatacatatttcagtttggtcctatgggtacccatgggatttgaatattaaaattgaacattatgagttttagatggttcattcaggaatcatctattcatacggatgtgggcaaggcaccatagccttcactgaccgagtttctgcaatgtgttttaatgttcaaatcccatgggtatttaatatattaaactaactactgttgttcaaacacacagactttgaacaagtaactctaagtctattagacattcatagccctgctccagtgacctaaagatcagaagtcaattttttttttcccttaaacaaagagagtatcacctggaagctatttccatgctggatcagggaaagtaaaatccttcaaacaaaccatagtttgtagggtgaagttaacaactagatggggtttctggtatgaatcatcaagaccagctgtgaaaactgaaccaactctaggggattgggaccaggaatataggagtcccaccaacctcacgtggaacagagcaaaatactgtatctgtgtcaattacatcactttgcaagcagctattatttatcatatacaggctgtgcattcatgatttagtcttgtttctacatctgtttatttgagacagggtctttctatgtagcccaggctatcctggaactttctaggtagaccagttgtccttgaaatcacagagatctacctgtttcaacctcctagtgttgggattaaaggcattcacaaccatgccttgccttctatttctcctttaaatgtatagcaaaaataactaatgaatgtgtaatatgctctctggattccatttcttcttctgaatactggcttaagtctcttcagtcctctaatagagagaggaagggctggtcacattctgtctaagatagcatagttgatactcagactcatgtgtctaaggaaacacaccatcacttatatagattcatttgtatacaattcaactccttccccttttttggtttggttcctttttttttttttttcaagacaatatccttctgtgtagccctggctgtcctggaacttgctctgtagaccaggctggctctgaacttagaaatctacctgcctctgtcttgtgagtgctgggattaaaagtgtgtgccaccatgcttggcttggaattcaactcttaaataacttctccatcctgaaaatttttaaataaatcaaacataatagattttctatgaaatttattctagaatctgttctgttttgtagtatcaatggcctctttgtgtgggctgtgttttcttttcaaaagcctcataaagcaaggctttgcaaagccctggttttcatggatttaaatattcatttaaatattcatgacatgaggtgcaaagatgtccagtgcttcattggatgccaggctgaattttctgggcaaacagtctactgcaaattagaaattaaacattgttctttgtatttcaaccaagaaactgttcctttttaagaaaaaaaatattctgagatacttttccaaacaagctgggctcaaatatctgaaagacagttaccgttttggcaggcttgtatccttatttcatactgtgtgaatggagccaagtttttcagatgggcagattgacggtgcccaacagggaaggccaaaagtgccacacctccaccactgagtaagatgctgtactccactggaattcggggaaccaggatccctgggaagagggagaaaaatgggaaagagaagtacaaatgcatcacgtagaatggtcaatgactctgccccttaggaattatgtgcacatacaaggttatcattgaaaggtaagggatggctcggaatagcattggagctacaccaaacacaatccaaaggcaagagctgtttaaacattcataatagtcatattcaaaaatacactctactggtaaataaaaatgaaggcacctgtcacttaaaacatgaggcaattaaggagggtatcatattttccctaggtttacttaaagtacattatataaaaaaagaacaaccaaccccagtttgcttgtgacaataattcttctgctgagcattgtgtaagcatctagtctgacatggatctttgacataatagcccataaaatatccaaatcacagtctacctggagaatccccagggcattaattattgagctaggacagtccactctgtcagcgagacttatgggccttaaatacatatgaaatttaagtcccataactgtcatttttcaccagcacttctcaaagaaattagttttttttaaaagaaaaatttaatctattcacaatctattcctgtaattaaatgcctgttaacttttatttggtcatgaagaaacatacactttttaaaggcaaggatatgagctttgagtgaaggccattaatagaggcttggattaaattatctcactgactggggagtgggaacatttacgggattacttccatgccacctgtcagtaagtctgttgttactgtcgaaacacagaaatctatagaacatcaaggggcctgatgacacaggagggctgaggtccatagaagggtgtctttgtttgtgtaggtgtaagccccactgagaggaagagctgacagatacctgaggtgctcagggctgtgtatactgtggattctaagaggcactaggaagatttttccacactattaggactgtcccgtgatcttagagaattctttttctttttgcctcactccctctctctctctcctctctttctttctctctctctctccatctcttttttgagacagggtttctctgtatatacttggctgtcctgaaactcaatctgtagaccagtctggccttgaactcacagagatccacctgcctctgccttcagagttcttggatgaaagatgtgtgctactgctgctcagcttccatggtctctttggaagaaatctgcttgattgggcagaacctgacaacccagactgagcagcctgtgttgttccagagagcagctgttctcaaaagtttcaaaaggttggaaactgttatttttgtgaatgtggttcacataacacacagtagctcaataatgtgtcaggtgattaagtggatgaattggacctcaagaaaatggtaacctccctcttttaaaaatctctatttaatgtgattgcctgagtgtgagtatgtgcatcacgtgtgcagctcccacagcgaccagtagagggcgtccggtccccctgaatctggagttacaggcagttgtgagctggaactgaaccagggtcctcagaaagactaaagttaaaacctctcctcctgttccggattgcacattggcctggtgtgggtagtgatgatatggcctggctgcctaatctgtgaaagcagaatcttagattaaggtaaaaggaaaacaaaactacagggctgagctgggaaaagctgtgtggataaatagctcagttttgaacctgccaaataaccattaacagaacaggaaaattagagagtgattttacattctaaattccaagtttcctatctgagatccacacatcctggacatatgtggcctggtgtcaaagaatactcaaagacaaggacaaacactgaactttctggaatagtcctttgatttgtagaactatatagaaacacatgattttcctgtctgaaccaatgtaattagtagaatctcactattcctaaaatgtccgtgtttagaaaaatggtaaagtcatgaaagcttttgcaagactaaaaggtgagaagcagaagctacttcagaatgaaccacacataggattgcagaagaaattcatgttgaagtacccttgtgctggaaagaattggttgtgagaaatttagagaataacttaattttagactctccgtgttgcttcaaaatgaattcaccatgaacaatacatcccaggcatggaacaaacagttggcctggcctgtgacacttctgctcagtgtcacaaaagaaaagtcaatattacttcttttcaggagaggataaaaagctatcttaagatcaaatccctagaatttttaggtaggttcacatttcttttggttggtgtactgtgtacacatcatggacgtagctagaagatgttctccaaggcccaattctcaactgccagatgaaaccaggaacatttttagtgttcccagcaagctgctgtagttaaaatcaagtttgagggttggaggaaggaattgattatggagatcatttgagactctcatttcatttactggtgagagggacccgagtaacatattaaagaactgtgccacgggctccccaccctttaaaacaacctacagaaagaacttcttgaagtagtagaggcaatggaagaatgaactagggaccctttcagtcgcaattcgacctttagatggggatatgtgtttacagaaatgtttatcaggggtattttggacacctcatcattccaatcccccttggggtctatttccttattatcctgatgtagcctgtagttgatggaagggaggctgctgtctgtcatgtatgatacaatgaggtaagaagaatgacctggacactgaacctgttactggggttggctctcttgggttttcctagtaccgggaatctaacaacacatctctttataatgatccagatttgtagcaaatgccctctgacacgataatctacaggactcaaggcagccataacgatgacaaatatgcatgggttagaagataaaatgtgagactaagaaactgtaaactcatgggcattgcttgaggctgaagccccagtatgacatgttcattctgtttctttcactctttggatagatcttgtggaagagcctggagaacacacttatgcaaaaatacgcttccatgttgttgaactacatacactgtacataggaacaggatcagagcctttctgcccctatttcctcagtcaccaccacacaccaagttgtctctatgagagctgcaggatgatgacaccagaggccatatatttgcacacttgtaagggtgacataagaaaacatacacacactcacacactcacatatgcaccacacacacacagacacacagacacacagacacacagacacacagacacacacacacacacacacacacacacacacacacacacacacacacacagtattctagtacattcccacatggtagaaattgctaaaaatccccaactctacagaagacagaatagattaaaaaagaaatacaataaggctataataacacatactaaccatgctctcatgtgccctcaacacttctaaaactctctttcacagaaggccactactctaaaaagacttgaatattatacctatgcaagtgactgtcctgacaacatctccctgtatggctttttaagcgtgcatttgtacgtgatcatgtttgctgtgaagataacctgtcattcatccttggtggtaatttctagtggtcccccacacaacctgtctgaaatctgtttatttgtcttcaatctgtacctacagcagactgcttccaggatctgcatccttcaacttttctgctcaaaaaatgacaggactcccagcggggccagggagcaagattgcacttctactgtgtttcagatatggacacaatattgatctaggtttgagcatggctagccacagcatgaaccggggaaatgtatttttcacctcacagttaatgggcaacgagggccccttatgtacacctatgaggtgttggaacagaaaatgcacctctaaactgtggacatgtcaaacactgacaaacatctagaaaagaaggtcccaccactgccatcacttcgcagggcggtgacacagagtctgtggtgtccctgaaaccctgtgccatctgcaatgagtcggagacgatggagccctctggtatatcctgatgattaaatgaaacgaaatgggcatatttgttagaatcagctggggagcctcacgacttggttagttcccaagttcataaattcctgtcagagcacaaggagcctcggaaatgcgtgtgaaccaatctaccctaagtgcaaatggcagttttgttatttggtgtcagagttaccagtcgtacagtgacaagctgccataacacattttcttgttctctgaagaacaagggttgtattggttaatattcctggcggtgctccttttcataatttacaacaactagatgctgataggttatttaacatttatgaagttaagatgtaatcagaaaaaccctgattatctttacaaataaaaaagttaaattattcaacttttttttctctctttgtggcttcatttcacagcaggtgcatactttacaatgggacaagtcaatcatataagccctttttaaatccctctcttaagcatcaggagcagtaacaattcatatattatatatatatatatatatatatatatatatcacattaattcagtttgatagcagtgtttgcttcaaaagacagcttgcacttaggacagcatctctactgtactggccgccatcatcctctgtgctggcatgactgtctgcattatgtcctttgggggggtgaaaagtgaagcaggcttccttcccttctttgatggtgactgtagcagattgagacaggctgataacaacattctgcagccttttccttatccacagatggtggcgttccccagaggagggacgatgtcacatcctcttaatgcctaccggcctgattcagggtcccgcatcccgccacacccatgagtggggaccagtaattgcattctcgttggttaagcgaatacaagaatcattcttacccaaaggcaaatgaattctgcattctgtgaggtttggagctataggtgaaatgacccctgctggaccattggctggactgccctacaactgtactgtggccattcattttctgtatctatagcaaaattagttttcaaattttgagctagattatagaaatgataaaattattttctatatatcagttaagtagaaaaatagaatatggatcctaacaatatgcacacacacatatgcgtacatacatgacagcaaactagacaatgaatgtttggatggaaggaggtggttagcaggtacattaggttggagggagggcaatgaggagagggacgatggcaaaagacctgacagacacagatgaaaatgttctagttaaactcatcattcagcacagtgaatatgtgctaaattttcacaacttgatcacatacaaatgcacacttaaaaattaaatggttaaaaagaaaaatcatgggacaacagagctcttgtaggttgcttctgatagctacacaatgaataacctagagaaagtcacggtttaaaaaacccatattgagtttgctcactaggaaaatacggaacataggttggtgtggcagcccacatctgtagttccataactttgtgatgctgaggcagagggattgctgtgagtatgaagtttgctttgactatgtagcaaggcaatgtcacaaaaaaaccctaaatgtaaaaaataggacatgagacaggaaattatagttactgagaggagtaagtatttatctcaacaaaatgcctagctcatactaagactcaataatgcaaaatgcatttacttattaatatgcaaatgaaacatgaatcatgaactgggttttaccttttcttttttgaagcttcccaatccttgttatctgcttactgtattcaacagtgaaaaccaaaacaatagccaatgttgaatcatccaactcagtacaaggtgaacttttagttatataagttgacatgaaatgtgtttttaagcagattgcatccaacccattccccacagctgagattttaactcaatacccactggggtatcccatgtctatagatggcccatattgtggctaactaacctttcatcaaaatgtgattaataaaaagtatttatgtgcccacacaggattaattaaagtgatttcccagcagaagcatggttgccaactcttttctttaatggactaaaagataaatgggtaagggaaagtgccaggatttcaatattatgccttaaacttaaataactcaccatcctcagtgcgaaaaagcactcgccaaatgcggtggcattgttaattaggacatgattaaggggtggatagttcaaaatatagtcatcatcttgataaattacaatggttcattactatctgccgagtttaaataattttgaatgtttgggttcttaaacagcaggactggctgcctctgttctttcacagagtaaacggtttatgctctatgaagcctttgcttctcaattgtctataattttttttacctattaaggttacatatatctttgctttctttcagttggatctatcatgatccaagatccagagctgatatgaggtaagaggacactttaggaggacactaacctggcccctcttgcctctaatttgaatgataaccagctagtagcttttcagaactttttaccacatggtcttgaatattcacacctagccatgaaaggcaagttgctatcatgattccctcaaccttaaaaaagacttacttatatcctgtgtgattttttcattttgtttttctgtgtacaggtgttttgcctatgtgtatgtccacactttatgttccttcagtgcccttagaagccagaagagggtgttggattccaggggacttgagttacagacagttgtgagccctatgtaggtgctgggaatcgaactctggaaatctggaagagcagccaggctctttaaccattgaactatcttttcagcactaatttattttaaattatgtatatgtatattttaaaatatgtatatgtctgccagtgagtacagatgcccatggaagccacaggagggcatcagagctaaagtttcagcagttatgagctgcctgagtgggtgttgggaactgaattgaattctggtcctttaagagagtagtactggctgtttaccacagaaccatctctttttagccccttcccttttacaaaggaagaacctgagttttgggcacctatgcaggactacccatggccacagggaaactaagtagtggggctcattgcacattgactctgtcatctagttccctgaaagatgaaaaactatgcagccatcagacatagcaatagtccttggaaaattcatgtatgtgcagcacatttttctttaaagtctctctctctctctctctctctctgtctctctctctctgtctctctctctcttcctcgtgtgtgtgtgtgtgtgtgtgtgtgtgtgtgtgtgtgtgtgtgtttgtgtgtgtgtgtgtgtgtgtgtgtgtgtgtgtgtttgtgtgtgtgtttgtgtgtgtgtgtgtgtgtgtgtgtgtgtgtgtgtgtttgtgtgtgtgtttgtgtgtgtaggggtggtggtggtgttcaacacccacagacagagtggtgttccttaacagaaaatcaagtgtatgaatacttttacacaatagggcatggaaagtttgtatttcttgcctggtaagttgtagaagtctcttcctcattgctttttccatgaagtcagcaaacatcttgttgcatatgttgctgtccatccccagcacacaaagagcaggcatctcaatgctttaaaggtctgagtgttctggaattatttctgatgacatttgtcaggtaaatcggggataaatgaaaagagcttttcctgggcatggaatactgaacaggactgtaaaacagcctttgactgatctcttcatgggtagttgagacatttctcaaccggccctgttcccacctagctggatcttcctgccctagcttgctgaggcctgactattctttctgaactctggactgggtagacagaatcttctggttcacccatacaccttagcttggtggctcttgcccttatagggctaactatttcccaattaattctcctgctcgtgacttgcccaacaaaacgccatcctcccagaaccatttggttttaactaacaactagctctatcccttggactccttggctgccacgacacaaagcagagtgcatatttcatgcatttgtaagtcttccatcaaaaatgcaaagctttggattgaagagtcaaagcaaaggcaggaaggcagcagttgaactgattcacatttgaatcctggcaatgcctggtgaccttgagcacattgtactattattccacaattcaaattcctagcttggggaattacctcttagtgtttgcataagaattaactggagcttgggagcatcaggcacgtagtaggatttaagaaatgtacatctgtgacataaactctctcgatcacagtcacctttcccccgggtgttcacactccttttaccagcagatttattgacacgatctaagatgtagtttattgatagcattggaaaactaatttgaaaacctgaaatacagttaattacctaggtaattcttctgttgccaagcaaccatatagactatttgctcccagcaacttacctgcctaaggttacgctgtccatattgatccccacaaaatgcatgtgaaaagaagtcaactaattcagtcaatgttttcgctttgtacgttcaagagagagcccccgatctctctcttcagggatactgttgctgaccactttgggttgatgcgagacagtcagagctgctaaacttggtggtgcatttgagtcaggtggagacctttttaaaacaacaaccaaacaaaccatcctacatttcttgcccgtacctctagagaattttttttttccccatgagcctgaagtggagaatttgtgtttttcttttgggatagagtctcatgtagcccaggcaggcttccaacttcctacacagtggaggatgaccttgaacttctgatcgttttttgcctcttcctccagagagctacaagaacaggtgagcaccatatccggctcaaaaggtgcttggagatgggacccaggactttctgcaagcttccagctgagacacctcatagtctgtagagttgcttttgaatgagatcaccagagtctaaagtctggtcatgcttggaaactacacatgtgaactctttggtttgccttgtctctggtgtagtcagtccaaacttctgaatgcggggggatatctagaaaattctgtaaacagctttgatagaaacaagtttgcttcccttatgcttaaaacatgtatttgtgactacccaggacagaaaaaaacatcattatccaaatcacaaggtgctttgtgacagaatcaactgcacaggacacacggggcacagtcacctgatgcttcctgagtttggaacccttccacacaccagaaaaaatcatgtttaagagtttaacccttctgtatatgacaatgtttctgtaacggattttatgcatctagaacattgacaggactggaaatgatggatttgttaacagttggttaaatggttagagttagcatgcaattcttcattttcccttagtctgcactggatggaaacttctaccaagcctgagataagaaagagctactgttgcattttataagcaagggttatcttttattccacaatgagacttttcttattgaaaatattatatgtccaacataaaaaaaatgtgatgttgaattcaaagaagaaaatgacagtgctagataattcgagaaacatatcttgaaaaatctcaatactgtattgtactaagtgctttttagcattttgaaaatgaaggtattagatttgaggaaatgctagagaaaacacattttaaaggtaagtgtgtgtgcatgcatgtgtcatggcatgcacatggaggtcagaggacactttagaattatagttttccctttccactttgtctaggcaggtctctcttgactctgctgcactgtgtgttccaagatagctggactttgtgattctacccaactctcctgccgctgcctctgtctttcataggagtgttgggattataggtgtacatcattgtatcaggctttttatgtggactccggggataaaacttaagccattaggcttgcacagttagggctgtgcttttacctgatgaaccatttcttggtcccagaaaataaatagaaatgagttgttgaaatgattgtgttgaagctattaaagttgaatttaaaagattactcatatctatagaattatcatataaacccaggtgataatgccagttatataaatgacatcatttaacttctgtatagttctacatgtaaatactaatgtcaggactattgatcataaggagcctaagatatcaccatagaatcaacagaatgacaagaatgaatacaaaccttacaataataactctcaatattaatggtcttaattctctaatgaaaacactcagacctacacgtttgggttagcaaatacagtccatgtttttgctgcctccgggacacacacctcaccatcaaggatggtcaccaccttaaagtaaaaggctagatagcaggattctaagcaaaagaactaagacgtgaatagggattgctattctaatatctgtgaaactgtcttaaggtcaaaatgatagaagtaaatatttttacatggtactcaacaacagtacactctaagaagacattaaaattatagacacacattcacaagacagacactattatctctaaaaccacagattaacaccatcacagtgatagtgggtgacttcagtataccactgtcaccaacaaatggcctacccagacaagaaacccaaagaaacattggagtcaaatgacatcatgaatcaactaaatctaatggacatctactgaacattctacctcaacaaaacaaaagcctgtctccctgatcagagctttggacatcagaaggatattacatatttttgcttttttgagacaggattgactttatacatttttaacagtggaactttatgtatctttaagagtgcatagcatagcttttctttttgattgtaggaaagtttttttttattaaagtctagttggaaaattccatagtctattaataattagctgtttacaaaccaatcatgtatttcactactgatgtatatattgttaattaaacttttctttgacaatttcataaacgtagataatgagttctggcattctcaccctttcactttcttgacccctcttcagcactgttaaccctcccttcctccttacaagctcctcccctacatccatgccttctggttgctttgtgaccctctgaatttaagcaggtcctgtgtgaggatggaaaggaccctacccactgatctgtccagccttttatttaatctctgtagtgtctatttggtcaggattctacccaaggattatacttatatcaaaatgtaataatgcattaaatcatcaaagcagtttggcattgactaaatggtctaatggaggctcattgagtagagaggcgacatccagggttatcaccattcaccatggtaagctcatagttagaacaggccaatgtctttccaagtctcctgatgccatacagaaagaagcatggtaggccagtgaccgaaccccaggattcctgtggaagggaatgcccagagtgattataacctctgacttgtcttggatatatatgtttgagtgaaaagacagggtttttaggattttgagttccaaaaatgtgctgctttgatagaggcagatagatgtatgtatctacatattgacataggtagatgtgcatgcatgcaaatgtacatacatgtaaaaatacatactgtgatagcttgaatgagaagcatcccctgacactctagtgtttgaatattcgatactcagatggtattgttgtttgcgagaatttatggaaactttaggagttggggctttgctagagaaaataaaccactaggggtgggctttgggggttatagctataatccacttcctgttcaccctcggcttgtgctctctcaatccccgctccagctgcctgctgtcatgaatccctcacattagagactctcccttcaaagccataaccccaaataaactttttattcataagctgtttctgtttgcgatgttacaccacagcaacagaagggtaacgaacacacacacatgtagacaagcacacatgtgaacttactgtgtgatgtgtgtgatgtgtgttttgattgctccattcatatttatctataaggaagctacgtttactatgaagtcacattttcatccttatatctcattagtttccattaaactaagagagacagagagagagagagagagagagagagagagagagagagagagagaaagagagagagagagagacagacagacagacagacagacagaagttccatttttttctttacctggtgttggccatgctacaaatacagaatcagagcccagtgcggtgacattacatgggggacggatgtcttctgggttccacataggcatctggacaacgtaatcctcactctcagtgctgccacctccagtgtttgcttctaacttgtaaatgtacctgaagaaatgaaatctgtaatcagccaatctttgagaaacagtgacaatgtttgctggctccctaatctgctgttttacctgaaatttgtgacaacttttgaatcctttcctatgagaaacgttaccatgagcttggttgttgtgtctggcatagttattgtctcccaactccatgttgaaccctgtagtcactcatggtttttgctgagaatttcaggaacttcttggggtgtgctactgggctgtgaaaattcaatttagtcttttctatttctaaatgggttgaatttcagggagattcatttagaggcagagatatttaaattgatctgttattttccacaataaaactaaattattctctattctctgcgctgaaacatctgttgacgtaaggtctatcttgtgtctgctgagaaatgaatgggaatgaattgcaaatgtgtggtttgactcctgaagacagagcatagctagtggaggggtgacaggacacggtaggtgatgggaataacattctcccaatctctttagttgctcatttagaaatgtaggctttaaataccatttgatgaatttttgaagttggacattttattttatatatttaaatttctcatgctttcatgtcaaatagaggatgaattatttatatgttagaaggatttcatgtaggcggaaaactaacaactatttagcactcttatccgttacagcatggctaatgaacaaggagattaatgcaataattggataactttttaacgggaagtattatttctccgccttgaacaacttagaaagcttacagtgtagttggcaaagtttcactctgtcacctgctgttgggttccaggtttttatcagtgaaattctgttcatcactgccacccacgaaaagcaagcttccattacgcctcagctgatactgagaaatgaggccgttgggcttttctggaggattccaatgtaattccacggttgtagaattgatgataatgtgtcgaggtgtcacccaaactcctggcaaaaatgacacaatgaggttttattgtgaggataaaatacatgccttgtgaaatggcctagctctctccatgagcaggctaacccttatctgtgggttaaaacaatctcgtcgtggaaggaacaaacatgcatttcctttactctggagatgaaatgagtcaccaagtgtggatttgcttttacttttgaatgccacgctaccagctgtgccatgtttctgaggcttgggcatcactctggctgtaatttaatcaaggctgaaagaaaatctgggcatttgaaactctggggctctttgcttgggttgcctggaggaagcaccatcaggtatctaccggaattctacagttcagtaagttactttctactccctcctgcactgtgggctgtgcatgtccattttgtccagaatatttcctggtctcatttcccggtttctcaagattcttcaactgtctcttaacacactgtagtgccttagacccctgggatctctcttccctctttattcttctctctcctctcccactatatcctcttctctctctgtcctgctcctcctcccaaattccttccatgatctctcttgctcaccaaggctgagagctccccaaggcatatttgataccaattcagacttatgactccaattgtctacgttgacactgtctcttaggtatctacttccatgtcagaggctcaatggatcaacattggaactctggatttcccttctacagtccacatagctccaagcttgcccactgattcattttctcaggccaaatacacacacagaattatctccaggtactctccacccctgtgcgccccctctgccactgatctccgcagaccctacaaggctcctgtcttcactggggaacctctagccacagcctttcagccacatgtacactagcatctttttttaaaatttaaattagaaacaagcttgttttacagtgcactagcaacttgtgttttgcagttctgggggctgaacccggggtcggcaatgctgggcaaccgcactactacacagctgcgcacccagccacacctcaagtttaagctggtttctgttttctcactatatagctagagagcagccttgaacagctcctccccactgctggattacaggggtgtgctccagccttgaactcttcctccctacttctggattacaggggtatgctcaagccttgaactcctcctccttagccctggattacaggggtgtgccccaggcttgaactcctcctccctacctctggattacagggttgtgctgccgcttccaggcaggctacctctgttgtgactcttggctttctctaagcctttggaatcactcagttctctgcttacttcatacacattaggaaatacctgactcttccagttttcacaccattcccttcctatcatggcctctgtggcaccaattttccatcctggtctctatttctccaccctcagcctccctagcaccacagtcacccgtatttatgaccctctggccacacccttttctaattcccaagtgcttcaggctcagttcttccctgtcagtaggatttacacttcccctggatacatctctttagacacacaggtttgcatgctatccgctcagtcctctgtatagactcctctgtccacgcagcttgcttgacatctactgtcttactctagcctcttcctaggggattttgactcagtctccatcacaccccactttctatttccctcacaagctgtacaacgtcatgatcatctttttctttgatgtgtttgttacttttcttactttgtttcactgcatggcccatccacccctctgccgtctttaaagcaaaacgtatttccaatgaggcagggatcttcagtcttatctatcaacacgtatccatgaatagcaaactaatatgggcaatgtatacctgacgataccactagacagttgcagaaagtaaacaggtgaccaccgtgagagtcactgtttcatggagttgcctcttcagcataaagaataaaatatatacagagatagccacagcccaaggtctgtcatccttaatcattctctcaaaaatcattttatgtttatttactttttattttatgtgagtgtttatttgcatatatgcgtgtgtctcgtatgtgccgtgcctgaagagaacaggagaaggcactggatcccctggaactgaagatacggatgactgtaagacaccgtggaggtgctggcaactgaaagagcagaaagcactcttaagcaccaagccatctctccagccccttatggcactcacagatgaggtatctttgggtggagaatctgaccgtagggtggggaatctactggagctggagggtagggtggggagtctactggaggtgggtgtgccctgagcagacctcatatctcttcttaggggctttaacaacactcgttccattagactccctgaagtcaatagcttctggttgagtgtgtctcccctgcaagttacactggaaaaagtaagcttttgacatttttagaagaaaaaaatgttctggacactcaaatacaatttattcggcagctcaccgaagaaaggaaagagtctagatagatttcaaagggcctcaagctcacgggcattcaaaagagcaactgatatctgaggagagagctgtccatcttgttttccctcagtgctagatatagagcgcaccgagacctaggcttcgctgccagtagcttcaaacagtgattcagagttcagacttcaatagcacatgaacttgttgattccggagatgaaggtttaatctacttccttgtagctcatctctctgtccttgaaggataaattagagatcaccaaggaagggctaaggagatgtacagtgggcaggatacttgccacacaagtgtgaggaccagagtttgaatccccagcacccacataaaagtcaatggagcagtctccctgcaaccttattttcagggcaatcataggcgatacccaaagatggcaagctaactagaggagccaaatctgcaggctctggattcaagtgagagacacagactggacctgtaaggtggaaagtgactggtaagacatctgatgtcaatctagcctctacatacatgtatacattcacacgttcatatgcatgtgtatatgtatacacacacaatgcatgcacgtgtgtgcacacacacatgaatgccactcacatatacacatacaaaaaattgccaaagaagaaaaaaagccatagcttagcttccagcacacactcctcaaggcagcctctgcacgtggtggttctaatgaaataaaagggacccagattttggagttgtttcatgttttcaatgaaagtcaagtttttcatgtgttcggctccatggatctggttataaccacatgccgacagatttaattggaaaaatgaagtttcaatgtacaaatagcagatagtgaatgctacatatttatctgcaggatgggtttgggctgttgctaccttaacggtttcaagacatagttaatagagttgagacccacttgagtgagttccaggaatgaatatgccccctttcttctccaactctccaactgcagcttcagcaccacaaaccgattccattctttgtcacagtggggcagatctgaagcaatcaagggaggaatagacagaaggaggagaactgacctcagatgccaggatagtgctaaccaggtgggaagtataggggcccaaaccagaatgcagactttaggagctgttttgacacaacaactaccagaaataaatgctgcaacgggatttgcttcaaattgatcttgagttctggttactattacttacttctaaagttcctgaaaatatccattaactaatatacccaagtgttcactctcaactggcttcttaacatctgttggtgaaagagtgagttcaccacatcaaggggcactggtttgcatagttaaacactactggctggtttattcattcatactttgacatctgttaggtcctggggatgtagggaaacaggcatccttgattgtcttctaggtcatcgtgccatggtaaacacagatttttaagcacgaatactataaagtggtatgatgggtgcttaaagtgaagtacaggggcagggagagcacccaggaaaggagacctgggcacagactgtggggtgagatcaggagagacagggaggaggtactcctaggagaaaactgctgtaagctgcattgcacagaagttagctggtggatgacacaggtgcagctagtaaagtctgatgatgacacctacgtagagtcttccagaaaatggaaaagctagtaaagtctgatgacgacacctatgtagagtcctccagaatatagaaaagaatttgagaaggtgaatattaaaatgtaagtctccatttcatggcatgtggtcaggaccacaaaatcagcagaggtaaaacccgaggcatctatttgatatataaatatgataaggatttgtttccctggaaggaaatgagattttagagagctgactagctggagagacaccccttttgacatgggggaagaatcaggaggggaaaactgaacgctagctattagagaggaatctagttaggagaagatggagagcttagaagggtgtgtccaaaagcaggggagaagggttggaaaagaggaaaggactgaaaaattaaggtttacaaccagtgagatttatgaagaatgacatattacatataagaaagatggaaaattaagaacagctggcgtgggcctgaggtgatagtcattggtggtacccaagagaagagaacaggaagaagggcgaggcagggcaaggggtggggtgagagagaactgagcattgaagatggaaggtctaacagcacagtggacgcacagaccttccgcccatgagtgcatcccagtgaaggctcagcccttggcagctctccatctttaaagaaggcagagccagcacccaagatgtggagttatgtgtcctaagtacagggggcgtctagtggagcatcggcagaccaggtgccagaaagaggaactggatgagcccaaggcggacagcgtctcccttgccttttcctttccccaatattgatgcttgaggaaagctgggctagggttttgcatgatttcaccctgaaatgaattgatctcactgggccggcaggtgttgtgagaaaatagggtagtaacccgacctgggctcctcccactacttgatgaagagccacaatttctgatgaggatgagactgcagagaagtgtgtccacttttccctgaggccaccctgtgcatgaacacattagggttagatgtaaagaagaagaagagggaaagaacacaggctttttaaaatttttcctacatgcactcatcactctcaaatcttagaccttcaatttatagtctgatttactgtaaaagtggcatttcacaatcaactgttcttgggctagtaattttttattattttgaattattaatgcccctctctctctctctctctctctctctctctctctctctctctctctctctgtgtgtgtgtgtgtgtgtgtgtgtgtgtgtgtatgtacacggacttgtgtgtgcaggtgcttttggaggccagagatatcacgacccctggaagtgaagttacagactattgtgagctgcctcatgtgtgtgctaggaactgaacccaggccctctggaagagtactaagtgctcttaatcactgagccatctctccagccagagttagagacttaaaagggtaagtttgtctctatgttgtaatagtgtaccagtgtttaatgtcattgatgactggtccctctgtttccccaagctaaacatcgggactgtattgattccctgcacaggttacccatggatgcacatacatagccagagaatggatctatagctatgttgggttccagaggaaaaccttatttctttgcacagttatttctggtgagggaatatcatgtaatatcaaaaaaaattgaggacatttctttatagcacattcccctgtatcatttaaagttacattttccaaggcataagacctagacccctttaaaaattttttttataaggggaagtggaaaaatagagacacttaaaaaataacttaagaagacaggtttggtgattaaaccgacaccagagacccccctactttaccaggcttgagttttagccaagactggttggtaacacctttagatatcacccattatcatccgagtatccatttgatggtttccctttccaaaaaatccactgctgctctcctcctttcataggaacaccaagctctctgacatgaagcattctttatatagagaacatcattagtgaactcctagagaggagccatatgccccatatgtggaattttccatcttattccccatttactggtaggaagttcaggtttaatattccaaggtaccatagtccttttagtagaaaagtaatgaacaagtggtttgggactctgtcgtggcagcagagaccaggatcctctttacatacttacatatgtgtgctttcgtttctccatatgtaaaacaggccgatgatgataataaatattaacagagagtagatccctactacaggctaccgagcacatttcctccataaagcaaatgatatcacctaccccaggccccaacccacagggactcattgtcgtcacggggttggtaactccagattttttctctgtgtatagttatttatcactagaaatgagtgcagtcatttctaatcacttttacacatcaagtggtttccatagttttgcagcatccttgtacgaacagatcactttttcccacaatgtgattttatttagcaactctctttctcaagaatatttaaatttctctccacattttggtgttaagcaaaataatgcttccacaggcatcctgacacaggtccccttctgtgcgtatggatgagtttcaggcgtaaataatgaaaacttaactgctgggttaaggaattaagactttgaatttaatagacaataccaatttgtcttctaaagggggggtcgtctctctatacattccttcaaacagcctggtggaatatcttaccatgtatttgtctttgttccttgggctccaccacagcctatctgctccataaaatccttctttatgtctgtgataggttttaatctctccctcagattatatttttgcatagacacctggtaattatattactatctttcttacttggttttattttcttgaaggcagagactgtttttgtcagtttcagcagcacttgggtggctacttattcactgttaaaaggtttaatactttagattttgaggagcttcgtgtccaagtattcattttttcccataaaaaagcaaatctcaaggacttaaagaacttcaaataacttactgtgagcgacagtatatggtttactcaagcctgtgggaggaggggacatgggatactattttatttcatcctgtcaatttgattccttgtgccttgtttgctacaaaagagcttataaagctaattaaaatagcacatgcaaactttttgtcccaaccacagatctgtcctggttaccttgaggggcagcctgcagggtctgacctacagagggctcactgggagtgcatccaacaggtgtacaggctgcaagggtgaagctgtagttggtgtatggctggagacctgggaagagccagcagaaaataaagcacagcatgagagggctgctcattaacaattatcaccagaagttagatgcagagctgtacatgtgctctgtaaggcagaaacacccacagcctcacacaggccaggcaggaacccacagcctctcacaggccaggcaaggcaatcatcttggctttcagaaggtataaatttcctgacccattcgttatactgatcaaaagttcctgaatgcttagccataggagatacttcaaaattcattattagtaaatccatccttcccagatcctctcccctacaagctgccgtttaaaactgtcccactttctgcaccagaacattctacatcccgaatagcctgctccatcttcaagagcaccagtgttcctctttgttttgtttgaaagtccttccctctatcacggtgagacattcctgtgacttccacccttagggacccttagaatcaatctaatttcctttgtatactacttgtcctttaaatatctgtagacagttaccaaatccccccgagttttcccttctctagactaaccaccccagctcctctgacagcctcccttgaaaggaaggtgagaggcatcactgtctagcctcaagccatatttacttcttattaacaccagctaacatttttaaacaaacaaaacaaaacaaccaacactgctctttttcaccaggtggcttcatggggcaccactgttcacttctgttgaatgcaagcatgcttttgtgtttacacacagactgaggctatctcaatgagggcatagcacctatttacttcctctgcatttatagaagaatacggctcagtaattccctggtaagtcctcagagggaacaaagaatgacttgatctatttatgacagaagttgtccatggttatatgtcactgctctgtggctgatgaccttggccaagttacctggcttctttttgccttggtctactgatctgtaaaatggggaatcactatagcatgtagcttatatgagaaagacgagatgggatggcaggtagtgttttatatcagcagcaggaacattaaggctctgcagcgtccagcaaggagaatattgaggcttacaaggtctttcttcaattcttgagaaaactgaaacaataccaatgtgttctttaaaaaaataacttaaaagactagacagtcaggtcattaagctaatttacagcatctactctgtggttattgtgtgtgattcccacagacatccagctgcatttttacaagatttatacttggtggtatgactcttcctccagatatttccttgtatcccatcacttcatgtagatggctggacattatatctatctatctatctatctatctatctatctatctatctatctatatctcagatttccactactctaaataatacaccagtcccttttatctcctgaaacaattctctccttgtacagagttcagtatctctgatgcaccaggtatctttttcttacctttcttgttttggcacaattgccaagagaggcaggactctgatttgcctatcagtataccctgtcaacagtgatggcacaaagtaggtacttgcaggatgaatggaggagtcagctcttggattcattccgggctggagtgatggtttgggttttctgaggaagcagtggcctaggacagctggagttgcttgtcatccagactcagggccttttgcgtttccttatggacttagtgataagatgcaggtacttatttgattataatcttctgtttggttgctagggaggatttacataattttgatatttacctgattttagatgaggaatataactaaagatctaagccattcccaagtcatatagctttgataaaagcttacagaaaaatgctaagccaataaaacataagaacttggagaaaatggagagggacacacaagaacaaaagccagaggttgtgatggcaaactggctcagccttgcaatgtgagtctattccacctccgaacaccatttcagtggcatcactttctttctctgggagaggcgcattctctgcaaaccgggatggcatctttgaatggtttctggcctctcctcctccttggcgaccattttatgagtccagtgttagcttacgctagtttagagaatagctccatgaacaaacatggccagggtaagggctatgagatgtgatatccgtgtcacaagtatgatcttaccaaacaggtcctttcttgtggttccacaagcttttctgcccacagcatctaccttgctcttctgtggtttgttaagtcataatgacatcaatgtaatttgtgagcagtaaagttttctatgttttttttttttgatgcaagtgtggaaggaaaaagatgaaacacatagggctggaggcaaggatcagaagttaagagcactgttgctcttctagtttgagtcctagcacccacagtaaacagctcacagcctcctgtaactctaactccaaggggatctgatatctctggcctcactgggcacatctatacacaaacacacagatatacatatttaagaataaaataaatcttttttaaaaagtaaagagctgtttgtaggcagtttgtctttcaagagtacttttccagaaaaaaaaaaaagtctcaaaaaaaaaatgatagccccacgtttctttgtcctcttatgttctggctcttctggtttcagatgagcagtaggtgctaaagacaattttagcatggatattagaagagaaaacacatcagagaggcatagcaaatttgatgagatgaataggatatttgtaacacagaggttaggttagaaaatccatgtctatagaaaagaagctgtcatttctttctgatacatcaaaatggtcccatgaatcaatgttattaataaatgattctgggaaaactgaggtatttggagtattgaaacttgactccaatatcttaccctggagatgaatcaattccaaatagactgttttagttggctttctgttgctgagatgtgaccaaaagttacttggggcagaaagggtttattacatctgctaggttagagtgtaccatcaaaagaagcctgggaaggaactcaagcaggagcctggatgcaggaactgaagcagagaccacagcgaggaatgctgctttcttgcttgttccctgtagctcactcagctacctttcttacacagcccaggggcaacctgcccagagtaggctccacccacagaaatctgatacttccaatacttccatcagtcagcaatcaatgaaaactccagagacatgaccacaagccaatctgatggaggcaattcctcaatagagagtctctccttgtgagtacgtctaagcttgtggccagtttgcaaaatctatgacatgcatcaaaaacatcaaaagtgagaccccaaacccagaagctcctagaagaaatcacaggggagaaggtggttcagcatgctagtgtagatgacggtgtgctggcccaaagcaccagaaaccaaagcaaccgtgagcagacagagcctcctgccaccttacactgcaaagcttcagcacagtacagcaaagaaacaagaacgagagagacagcctgggattggaggaaacacctgctcacccttcatctcacaagggctctctatccagaaggtatgaggagctaaaaaggaacaatgaattctacacgatccaattaaacaggaccaatggtctaagttgaaacaattccaaacaacaacaacaaacaacaacaacaacaaacaacaacaacaacacaaatggtccactggagagatgttcagaatcattcgccatcatggaaacacaaattaaacgcagatcagagcagccagaggacaacactctaatcagaatggccattgtaaaaaatgaggaaatggaaaacactggtgagatgtagagacaaaaagaacgtccagacgctgacgttaggagtgtacatatttgtcactactatggagaaaacagactgctcaatgatctcagtactgaatatgcccccccccatcccgccatggagaggggcgtggtaaatccagtatgtggatgatcagtctgtgttgggacatttattgcagtctttaaagtgatcaagacatggagtcaatttatgtgcccatcagggagtaaatgaataaagaaaatgtgtttatctaatacaatggaatgttactcagctacaaagaagaataaaaccctggtacttgaaaccaaaatagatggaactagaacacattatgttacatgaaacaagccagatataggaacactgcacactccgttttgtatatgtagagaataaaccagttctcttaactgtaaaatagtcattatttgaagttgagatgtagtaggagtgtatgaaaggggacagatgttatcagtgcacaccataggcaaggactgaaatattatagtaagcatcattatataaacaattacatattaaataaaacaaaacaaaataatagtactaagatttggcacaaataataagggtcttgtgatatttgtagagtttcaaggattattattattattattattattattattattattattattattattattttgattttccaagacagggtttctctggacatccctggctgtcccgaaactgactttgtagaccaggctggtcttgaactcacagagttcctcctgactctgacttctgagtcctcggattaaaggcgtgcatcaccatgctcagcttcaaggtttaagcaaagtaactgaaccatttccagacaaaattctccaaggtaaatgaaagactgaaggaccagaaaaggtgggatggaggtcagagccacaggggaagcctcataggatggtgggctcagtctatttaattcctggacagtttgtccccagtaactttaaagggttaatatgagttaaatggaagaaacacacaggcttgtgtccacttatgactgccaggaccccacacaacttcatggggctcgttcttaaatcttcttacggaaaagctttggttttccttatatatataacggttttctgcatcatcaggatttattccttgttttgagttgaccacacatgaactaagaagtaaggagacagaagaactagctagtcacaaagtgccacatggttctttcatgtttgcagctcagaattgagtgtatccatcatgcaaatcactaaagagtcagattgtgggagatgacttctgtgtagctgctggaacttccttttcccatatatggaggttggaaagagagctgagttcagaaataaagaacttcagcatcctgaaaatttcatttggtagcttgggatgagtcacacctaaaggcaacatgcaaagtttccctttcatgagccagtaaatgtacacgtgttcagtgtgtttgcttgggagactgaagcaaactattagtttaaaaattgacccatgttatttattgatgggggaaggccttctgtgtatatgtctctcttattggttaatgaataaaacactgttagccaatagggaagcaagataggtgggactaggagagaaggaggattctgggaaatgtagtagggggaagtctcagtgtgatcccaggaaaacagaacacataaggctggcatcctcggtaagatgtccttataaaaatatataaattagtagttatggttgataattaagactgagctagcaaataggaaatcctagtcattggccagtagcattgtaactaatataagactctgtgttatttggggcccctaaagtggcaacagagcccaggcagctggtggaaagagttatcattacaatttatctatatacagggacatgttataagtgagaccacatatgatacacatgggcgctgtagcagacttactccctcctcccatgtgatttgcctttatgcaagacagttaggattatggaggagagatttaacaaggacaatctattaagtgtatgaagagttttatgctgaatatcccccacataggagttgttattcttgcttcatagacagcaaagctgaacctcaaagcatagaataaggagctggtcagatcatatctggagtttgcccaagctcctttatcaagtactaagttcctacatcacagaaagaccatagctacaggaactcaagtccaccaataatggcctcttcccttgatgattaaactccaaagacagaaagatggcagaacacatatcaacagctcctttaggaaggaatagtatttaattgataactctaggttgtatgcatttcagctgctttgcaaatgaaagaaatatgctcaatgtatggagttcaaacagaagagaagaaacagaactcagggttgtttccagtggtttctccacttttacttctcttttgactgacatctgcaccagacataaactttagagggattgcaattataatcaagggaatttgttatgaaattatatgaccagtgccagtggaagctggggaaggtgcttaccaccaggcctaatgacttgagtttgattgccagggtccatagtggagggggagaattaactcctaaggggtatcctctgcttctcatatacacactctgccatgcgtgtgcccacatgcatgcacacgcataaatacatacaataaaaatgataagtggcatcactaaaatactagtgtttattaagcatactcctttctgtggtccccatgggtatcaatagaaccagggccctttaatgcccattgttatcccctcatttcacgcactcaccacagagaggtggagggggcgctataggatctcggggttcagaaaggggaagactaatgttgcacctgagcactggattggataaggtcgtctgaagcaattgagccaaacaccctagcccagcaaggggaatgatgacttaggtagctcaaatccctgagaatgctccagtgacacaaaacacccatgtggggcatatagctccatcttttcatctggagcattatcacacaggcaggagatcgtggctgttggaagtccagagactcctgacagttaccagccaattaaacatggccagagatgaggtgtctgtcctctaggtgcctcagtgtccccacctgaagctgaggttatgattggttaactgccaagtttaggcatagatgaatcaaagggagacaccccctaagtgcgtcatccttaataagttttagatcttgtattttttgctcaatgaagagggctattttaaatagcctgcaacgaagcataagcttccactgggcacgggtgatttacatgtacccagtgacctttcctatcaatgactcagtggaactcaataaaatctacacttttcactagatttgctgtcatgttaagtgagcccctattggtagctcttaaactgagatatatatgtgaaatattagcaacaggcagtgaaaaggacacaccaattgaaaactactcatgaattgatcagggtgagaagagggaaataaagagacgtctcaaaggaaccattctgactgacacttaatcctgaagtcgaagagaagaggcagaaaagaaaacatcattcaagtgaccaatattgaatgagaagagtaagaaatagcatcgcagagcagagaaaggcaggcgcagggagacaaagcaggcctttaacagctcagaatagcaaagatgactggggcgaataatcccgtgaatttccctacagggaatcatgttctctttgagaggaaaggggcatcatataaccaaactcattataatcacacttccaactagcattactttcaagagtaatatgcgtcaaaaagggactgaaagaaaaaaaagaccctaccgatggttcataaaaatatgatttggcaaagaaaacctctgtcgatgtcagttacatttgtgatacactctagaaggaacagctggctcctggttcttaatctccagacgcatcatcagggaaaggcattttgttcattatgtcttcagagagaagccactactctccagcatccagtcagtgatgctgtaagggtgtctgttattttccaagggatttccaagtagccttaagtgcagtgccattctcatccacggtgaccagatgagttaggaggagttctggcagagtggactccagataacaatgatgtggacaaaacaaacttggtccagcatgcaggctcacacctttgatcccagcaaaaaggaggtcaaagcagtcagatctctgtgagtttgaggccagcctgctttatgtaaccagttcccgcctagccaagggctacactgtctcaaaatcaaaaccaaaaaccaaaccaaaacaacaacaacaaaagaaaataaaaaataaacaaaataaatgtcgaatcatttggaaggttcacaccacactgaagcagagagggagtgacatttaccctgacaaaaacattgagcaatgtatatatttgttggaagatcacagtgtgtatagattttctggtactaaggattgacccccagagcttctagcatgctgctgacgactgtgtaactcagctatagccctagttgtctgtctttatatattgaaacaggatcttaggtttttgcatgttcagacacaaaatcatggacaacacagagaataagggttgtccagagccactgagacaaaacgtaaggaattagtgattgtttaggctgtggaccttgcaatacctgagagaagtgttgaattctttagaaattagcatctagatagttcttgactgtgatcctttgggctcaataccacatccactagcagacttaaaagagaaaatgaatggttgatgctacattattattttaaagcaggtaggtaccaagtaaattttctttagctttggaaaaatggaaatgaagtcagtctttatgtttattttcacagctccaacattcactgatcagtggttacacagtagatgggggaaatgcaaccatgacactacacgtgactgcaggacttgggggctgttggtggctggggacatagccactgtctaagatttctttgattctgtgtcaataaaatctgttgcctgtcagtctgcatccccgggtatctagtgacagtagctttgaggcatggctcggatttgctcagagatccaagctcaggggcctgcacttcttttactcttccgctcttactgtctataaattctcagtaagttttgaacaaggaggcttggattttcactttgtaatgggactttcagactatgtaacccagcctttgatgcagatgagcttgatagtgggacctctatctacaatcaaaacagatataagcttccatgcgttgtggtgattgctacattcaagaaacactttgggggctgtgtatgtagcccttgagtacttgcttggcatggtggggaacatctgtcatcccagcacaggggaggtagggcaggagaacaaaagtctaaactcttccttggttatgcagcaatttggaaaccagcttgagctacacatgtgtagcggcatcttccttgccagtgtgtttgtgttaatgaccacacccctttgggcttggcttcaggtgcagacaaaacacaaagagggaagctagttttgaataaaggaatatttttaaaatgtgaatgactatgaacatagggcaaacaggtaacaggaagccattttctctgtccttaaaaagattaccttctagttgaggcataaacaaggaaaatgttagttatttgacccctgtggctgtcactgtgtgtgtgtgtgtgtgtgtgtgtgtgtgtgtgtgtgtgtgtgtgtgtgtgtgtgtacatgtgtgtgaccccggcacatatgtgtaggtcaaaggacaacctcaggtatcagccctcaccttttaccttatatgaggcagggtctcttgctgtgcctgctgtgtaccaccaggctaactgtcactgagttttccaggattctcctgtttccacatcccacagtgatgtaggagtcctgggattacaggcacatggtaccatgtgcaggtttacgtgggctctggggattcaaacttaggttcttatgcttgtgagacaagcactttatccactgagtcatctccaagctcaataaaatgctataaattccaggacaataaagatagcttgtgaccacacaaccaagttatctaaaggcaaaaccttcacaaagattttccacattttgtcatactgatgttcaaactacttttccttttatttttttcccccagaagtgatgtgtataactctggtgtcagcataatgttaatattccactttctgttgtaaatagaagtgttagggtttatgtcacctagcacaaagggctttcaataacttcgaagcagatgagagaaggcaaaatccttttggcttgatgtgcctcctgactgtcctgcaatgaacagccccgaagcagttcatttggcaacagtttacacagagttcagagacacatgggcctttccagacacagtgctgaggaggacgccgtccattcactcacttccctcagtggagtcagtcactgaggcaatccttttgccttcccctctatccctaagacacaggctggctagaaagactgtgactgccatccagatgttgtgtgcaggacaggacagtagatgatttagtcataagtgatctgggaaggtctctactgacaagctaccctgggctgtttgcattagtgaatatgagctggagggaactgctgtctcctgggtcccacagggcccggtgtggggagataacagacaatgctccagtttacttaaagcattgataacacctctaaataattaaccgaggacttcctgtcttcaattacttaatgctttttaaaaaacatctttagaggattataagcaatttatgggtttcgagtgatgagggcctctgccgctattcccacaaagcatttacgggatcatgtttctgaggcttcgaagtaattaaaagcaagcatggagacaacatggctgcagcaaggtgctggtgggtccctcctgctatccccaggtctgagctccttcaggctccaggaaggttaccgctacggcttcattagggctctgttgcttagggagtacccgtgtttggaaacaaagaaaatctaaatatttattttaagcagctcaggcaacctttcaacaaaagtcttagatagtctgggaagcaaattccattgttttcctttactccatgaactcaggaaacactcatcacatcagaaatgcttctgtcctgcctttggtcagtcagctgcccgtggacctggtgttctctggcagagaaccacactgtggagacccttagatcagagatgctcacgcctagcatcactcctattccttaggaactgcatttacaagcttcgaagcccctctccttagggctctattgcccaaatgaaagcttctctaactgcatttaagacagatggatggaccaaatgactctggagaagaccacagcaagccacaagtgatcaaaattcagagaacaatggacagaagcgcacagccccattagatacactcacaacacaagccctatactcagtgctagtgaacactgtgaaagagcagaaagactgtaagagccagacgaccagaatgtctgccagagatagtgcctttgacacatgacagagaatctacacccctaaaatctcagaagtatggtcacctaagcaaggctggcacagtgacaataccagtggactactcactgacctccaagtgtggatgggggaatcctacaagcccccaccctaggtgaagagctacaggccattaatggctgctgagacacagagaatcagttgccctagggaggacacccctcccccgggagagggagggttatccaatcccaagtggtcaaatagatatctgagcaacagtaaatgaattcagcaggttgcatgcatatatatatatatatatatatatatatatatatatatatatatgtgtgtgtgtgtgtgtgtgtgtgtgtgtgtgtacatatgtaacagtaataattaaagagaaatataggagggttttggggaatgtggggggaattggagggggcagggaatgaggtataaatgatgtaaatacagcaccatgaaggaaatttccaaaaagtaataaatgaaacataaaaagaaccattttcactttacaatttttgtaaaagtttaacttatgtaggaaaactttaaaatattgattctaatgcaaaaacttctggcaccaatgtgtgtgcataaattcctctttgacatgaaaatattgattaagaatgacaatggaaggaagaatcagtggagtaaagggatttaaagaaagaactttgcaattatttcataattaatgaggccatccatcctgtgggtttgtacattataattgaatttggttagctgacatctcagagctggtctctgatgaaaaccagtacagttggcaacaattcaaagccaggctgcccaagactgggccacaattctttagctttgtctctcagtttgttgtgaaaccattatgaactggtacccagttttaggtggccttagctgagttttagattttaattcactttcaattataatgccattgtccacctaagtcctctatgacaccagccctgcatcctgcaccggtctaagcagcatccttttactagtcagtcttctctattgccaagaacatcttggaggccacaatgctaatgaactgattcattaatttgtatctgtgaggtgtgtgtgtgcgtgtgtgaggtgtgtgtgtgcgtgtgtgtgaggtgtgtgtgtgcgtgtgtgaggtgtgtgtgtgtgtgtttatctgtgtgtatctgtgaggtgtgtgtgtgtgtgtgtgtgtgtatgtatctgtgtgtatctgtgaggtgtgtgtgtgtgtgtgtgtgtgtgtgtggtgtgtgtgtgtgtgtgtgaggtgtgtgtgtatctgtgaggtgtgtgtacgtgtgtgaggtgtgtgtgtgtgtgtgtacgtgtgtgtggtatgtgtgaggtgtgtgtatgtgtgtatgtgtgtgtgtgtgtgtgtggtgtgtgtgtgtgtgtgtgaggtgtgtgtgtgtgtgtgaggtgtgtgtgtatctgtgaggtgtgtgtacgtgtgtgaggtgtgtgtgtgtgtgtacgtgtgtgtggtatgtgtgaggtgtgtgtatgtgtgtatgtgtgtgtgtgtgttggccagcacctgggcttgtggaagtcagaggtcaacatcaagtgtcttccttgattgctctccattgtattttttgaggcagggtctttcactgaacctggtgctgactgatttggctacattgtcttgacagtgaattccaggaatcctcctgtccccttcaccctccccccaacagtgttaggattatagatatgtgccacctcagtcactggctgttttacccttaatgtgaacacttgcacagcaggcatactctgtgccctctgagctatctccccgggcctcacaatcttatttgtaaaaatttttatattatcaagaccataaccattaggtagcagtagacacacacacacacacacacacacacacacacgcgcgcgcgcgcgcgcgcacgcgcacacacacacacacacacacacacacacacacacacacacacacgggaagctgtagccacgcctacttaggggctggctacaggtgtgcctgaccacacttgtgagggcgtggtcagggtgatgtagagtgagactttgaggggactgcgttttctctttcagtttcactttggtacttgctggacagactgctgccacaccagctggctaggttgctctgtaagtaaggcttttctctattaaatacccttatatttctacctgactccgtattggtaatttcccactatatacacacacagtcattctggctcttttgtagatggggctagtaaatgctgtggtactgtaaatgggtgtgttttctttatctttgaagaatacagcatgtgtatttcaaacttcttaatctttgaagaatacagcatgtatattacaaattttactcacaggaatgcagtgagaagcaagtgagctggactgtaactctctgttaagaggcaaagccatgaagaaaggtgagtgcattctgttaaacaatgcactaatccattgcttgtgtttatctcacttcaagtgaaataagatatgagaaaccctttgaattaatgaagtattctttgtccgtgccatcaccacattggctcatagtctccagatacggagtaagacgtgcagttgtgcaagcatgcattgtttctctaggattcatgggacttttggaaaaacaccaaccatcctgtcaatcagtgcttgcttaggtggcagaaaatcatggaacaaatacctcggagttgcttttccatctatgcagcatatattttgacttttgaaaagccaggcatatctttctagacatttctgtgctttcccgtaagttttgttatctgtgtggctaaaactctttgaaggcacagagcccagtaggaggagggcatcactttgggaagtcttagaaagaagtggagaaattgtgctctcagaatctcaacttccaggtatgttttataatgcctcactgaacaatgagctaaatgactctgtctccaaagctgtttttctttttgttgttgttggttttttgtttgtttgttttgttttgtttttcagtgaaacagagctaagaatcacctctgccctcttgggtttgaggtggggattgagataggacatgccagtgtttagacagtgtttggcatctattagcttattaccccgccccaattcactcagctcccactggcctggtaaggatgagtttaggtattagcaatgcaacactaaacaggttggtcaggcccctgtcttcagcctgcagactgcatgactgcatttattagtgatggaggcaaaaaaaaaaaaaaaaagactgggtggtgtgaagtctatgattaaacaatgtggtaagaagactactaaagtcagaaatacattttctctttgaaagaactattcaatctacccgtgtgaagtgttactatgatcactatgagggccgacctaatgctctgctcctgcactacactgttatgataatgacaacaatgttacacataaccaaaacattacaacctctatcaattaacagaaggaataatgacaagaacttccaagcagccaactgtcagccagggagtattagctattcactttggagctcactggcagccttgacatggttttcttctccctcttaatccctgcttggatatcctagccctattacctgtgaatctatccctggggaatgaaaatgcatcgtactgtttgtttgaaaaaaaaataagttaatactgacacaagccccctctctacacactgcgtatcaaagccaaatataaattatttttgaagttctctgctgccgtggcttattgctgccagtgtgggctcttcgattagcatggtttaagtaggacctgaccatatgtcaagagaacgcgtcctttcgaagtgacctcatacatcacacgcacacccccgggaggctcccccaaccccactgcaatgacggcctcctccagtacgtgtctgccccccctccccccgttctgtcacctgtgaccgtatgctgcctcatgtcacttgtgtcagtgtagatgagccctttcccatccagccagagctggtactctttaatgacatctttcgctttctcggggacattccagctgaggtgcagtgtctctgggccctgggctgtgatgtttggtggggagacactctcagggactcctcgggtggtagtggcgactacctgcgagcatggaaattaaacagcaatttattgtcatcgtccactaggaatcctgatcaatgaaaatgtcgcttttgttttacagccttgccgtctggcccggcatatcattagcaagggctgggagaaggagcccctcacctcctttcattctgtccccctcatccttttaaacaatgaaatctgaccttgaatatattacataagtctccaactactatttatcacaacaggtctgaaaacaattttgaaggcagagtgcggccctcagtttaaacaagtgtaaacccgcctggcagactgtctgcctggagaactctcttccatatggcccatcagtgtctttgcattttaacagcctgatttcacaaaagttaagcatcagtaaatatggagcaaaagctagatctgaacttgcttgcacagggcatactttcagcagcacaatggacagacttgtaccctttcccaagacgactgggtactgtctacatgttgctccggaaaaaaaaaaaaaaagaaccaagtgagaagaaaaacctaccagttactgaggcaatggtgtcacagtatggttctggataaaaacttgctgttgggaagatgccccaccccccacccaaggataaatctgattgcatgttttaaccaattgttctggcatctggtcgggccaggccctattatgaacaaaatatagaattattcaaggaccagtcaggctgtaacttttgattgggccagtcagctgccatctgtcagcatgggggcgggctctgtgtgttgtgtggctcctgggacagtgtgtgcagcccactattctgaatttaacgggaagaagagcattagagcctttccatctgctggggtgtctctcaggctgcttcccacaaagctggtttttgtgacatgacacttgattaattttcctccttagctctttggttcccctcagtctcctctaggaggttttctttctccacttggtagcaggtctctattatttaccactagtggtattctatttttgtttctctctggtgccctcaatggtcacatctaaacccattactttaatttctcagatagatctttctagcaagcccacctcctggtctagcatccaactagacatattttttttaaatttaaaatgataagtgatatctgcctctatcaccctgctctgtaaatagttttgagtaaacttgaagataaatctattgttttaacatttttgtttctgcttgcaccagagcaacaccaccacctgcaaatagctgaaaccacacacctcaaattacatataacacttgactttcttctcttcgggtttccagacttttgacattgtgacacagcactatcatctacaaagtttatgcttaagaaccaaccacagggctggagagatggctcagcaattaagagcactggcagctcttctagaggtcctgagttcaattcccagcaaccacatggtggctcacaatcatttataatgtgttccagtgccctcttctggtgtacaagcaaacatgcaggcagaacaatgtatacataataaataaatcttaaaagaaaaaataaagaaccaactacagaatcaaataattaataataataataataataataataataataaaagctgaaaagcacatagtgttctaagtagtttatagtttagtgttggggctcagctgtcatagcaaccctaggggtgtaaatgatcaagggctgcaggttggacacatctgcatattctgtacaggcttgacaccactctctgcaggttctatcacctgaactctgttgtaatgtctttttatttttatttttttaggatagcattttgcagctcaggctgaccttaaacttacagagctgcaaacgaccttgagctcctgattctccgaatgctgagtttgcagcacacacctggcttgtgcagggctggggactgaactcggggcttcgtgagtactaggcaatctctctaccaactgagctacactcccagcctctcagtctggacacaggttccccaatctaggcctttatcattcctttccaagacttctgctgaactgttggcatcacttatttgcatggcaggctcatccatttctggcttttaagtatggacacgttttggtggcatgatatttaggtgcaagttagcaactgatgagtaagcaattctggacatcttagggctttgtagaatactactgccccgctgcttgctctgccactctaacagagtccctatgactgagaaacacccaaagagaagaggagtttcctactgttgcttcaacgttctggaatctgagaagcataaggtcgggtggctgcccagattgtggggaatgctgttggaaaataggaaggtacttgggcttgtgtaaaagccatagaacatgagaggtggcctcaggataacctgcaccacagtgactcctcaggtcctgtgaacgtggccacacactcttgcctgagaaaggaggacatttgctcctgtgtcagcttttatccctagcaactcggcacctctccaaggtgccaccacccctcaatgctagctcttggtctctttcaagatcggaatggattatccccccatcccccaggtttcttccagtgccggatgaattccatgtgcttagaatctaaagacctagcactgacattaacatttattgagcactaactgttttcttgtattgataccaaccacattgtgagactgactggggaaatatcacaacaattacccagaaatcactgagagggccgtgaaagactcactgatactggcttaagagtttgctattcttaataaaacactgctatatggcttagtctctgtgacaggagtctccccatcagcatccacatccaatgaaggggactcacaccttcctcaatgccactttgagggaaacacggtcttctggccttggggaagccacatggggatgttcacacagcttcacgctggagccgcggtcaggcgagctcctcttaccttgctactgactgcacagccagtgaccgtgcaggctttcagctggtatgaatattcctggagtggctggatcccctctgtatcagtgaaactcagcgatgttccccggaatcgctcctttccatcacgaagaagaatgtagtgaataatcagccctgggaggtaggaaattgtaggctgtgtgtcacgccacattaactgttttcaagcagcatgtctgccatagagcctttcgatcgctttatttatttatttatttatttatttatttatttatttatttacacgtatgtgtgtggaggtcagaggccactatgggagtcagttctctccttctaccgagcaggtcccaggtactgaactcaggtgctcaggcatggtggagcaagtgttctaacggccaagcttgctcaccagccccgtcataaaaaaatttaaagacacgccaggtattatagcattttaaaatacaatgcctttctatgttcaagcagttctcagatttattactgggggaagatgcattcaggaccgagttacatgtttctctctgttcgtgatttaaaagacttttgttcaagaatagaataatttttacttcagctatattccacttatttgaaagcagctctggtaaaattgaggatttggggctttttgaaagattataattagtgtaattattaatttctgcttataaaggtgaacggtgatgagcagacacgaggggggttccatttatcaggaaatactccccactgagtacatgcatgacaatgtattctatactcatttccttattgtaggaatttgcaaacaaattaggtcatctttttctgaagtggctcaataccatttgactgcttgggcttcttccagtttaagaaaatagcgtcttcagggttgcccgctctggcccatctaggggccccaactccttggggcaagtcttcttctgtgctggctccaacagactggctgaatcctcgcccgccgctgttccatgcagaaaccctgtattcatacatggtactgggctcaaggttcacatctgcaaagacaaagagcagactcaggggttcacttttctctttaaaactatcacattaaaaattaaagtcaaaaccatttttaattctgccccccaccccgtgtgtgtgtgtgtgtgtgtgtgtgtgtgtgtgtgtgtgtgtgtgtgtgtgcgcgcgcgcgcgcgcgttggtgcctgcagaggttagatgattgcattggatcccctggatctggtgttctaggcggtttgtgagcctcccacatggatactcagaactgcattctgatcctctgcaagagcagtacagactcttaactgagccacatccccaacccctgaaaaccaagatctctaaacatttaaaacaaatgcttaatgctctttccctttgcgaataaacaaaaatccagtgtattttacaaagcactagatgtgcagatgggagtctcacagcaaggaactcaccatttctgaggaaggaaatgtttgtaaagacacaactgaggggctgcagtgaaggctcagagggtgaggtgcttgctgcataagaagagagacctggtccacacccagagagcatggcagaggcgggactcagcagggctgcaatcccagcagtgtgggtgggggtgggatggagacaggcagatgcagagcactcagccagtgggagcacttatctcaaaaagatggataatagacaaacaacatggtcctctggctcacagatgtacttacacacacacacacacacacacacacacacacacacacacacacacacacacacacaagaatgcatgcatgcacaggtctatgcaaaggaaatgattgtaaagaagactaatataaggctaatttgagtacctcaaaagttcctgtaccactttatttctagatgaggcaggtttgccaatgctattttatacttttatcactataaacattattattatgttgttagtattactttttaaaaatatcacatgttatattttcatgagagacacttgaaacttagcttctggtagtaccatgttagtgaataaaaacagtagtccctgcaggatctagctctaccaaacccagaacccaaagccaaaggccaactaaccaaccaccaatctcaccagaacaatgaaccccaaccttccaagtatttgattggcagaactgtcattagataatgactcgtgtgactcagtgttgtccccaaaagttcaataaaccccaaagtatcaattttatgcctttacaaaaaaaaccctagaaaacaaaaaccaaaaaagaaaaccctgaaagtttagttatttaaatgcattttgcacttatttaatcttgtaagttttaaaccccgttttttcttgccaagtcttcgtttctgagtgattctttgtcagagtgaggactggaagcagctgctctggagcacgttagcttcctccacgggactgtgttcatttgctccccctagtcaatggagccacatcctctctctctctcctctttctctctctaaacattttattgattctttgtggatttcacatcatgcatcccaatcctacttgtctccctgccctctgcccttgcaacctttcccacaaaaccaaatgtaaaagtagaacaaaataaaaacacccaaaacaaaacaaaacatctgggcttggaggctgtagtgtgacccagtacaccctttagtccatacatctttacttgttaactgaaatgagcgattggtctggtttgaggtctctggcttctaccacactgtggacactgggccttcactgggattcccttggatatcttattgttgcctcgtgtcatggagatcttacggttttggacctgctggtctggccccttcacattctccagcagttcatagatgaggtgggcatgggggagggctacctcatagtcctggctctggacctggatggtagctgggttggttatcatgcggctgtccttcattgtcatcccccgggtgagctcttcagcactgccctgttccactcacccaatgcagctggcagcaaagaacagggccaggtcttctgctctcaccacactacactgacaccatcaggaccagctctactgttttgcccagatgaggtatagggcctgctttctgggtggctgcacttgctgaggggcagagccagctcttaagttctcatggcccctgaggtctgctctcccgtctgttacaggtgacaagtggtcccagggcggagggcagatttcccttacccttgccactctttgctgttcttacctttcatggaagggtgtgacaagtgttgcaagagtccaggctgtggcctcatgacagttgtacatgaaccacaatggccaaacatactgagacactgttttccaacaagatggcttttcttttgctcctgggctttgcaagatttgtaagcctcgccctccttccctcaaacttgtagatcccagcttgtctttcactctcagttcagacacaaagtctttcccgacttctgtgatctggaccaggtgtccttaccacactcctcaaaagcatctggggatcctgaaggtcacttctgtcacagtgctgacatggattctctttgtcacaccaccctgtccccaaacacccaagcaagctcttcatctaggcttcaagtcctagagtgtaattcttgcttgcctatagctgctggtgctagtataatgattacctagcagtaggtattagataaataaataaataaatatactcattacttatattatacaaacagctggagatcaattctagcagcttgtgcatgctaaaaaatgcgctaccattaggatttatgcccagactcttaacaaataaataaataaatacatatgtaaatatataaaacacatttcttttatttattttttttttttggtttttcaagatagggtttctctatggctttggaggctgtcctggaactcactctgtagaccaggctggtcttgaactcacagagatctacctgcctctgcctcccgagtgctgggattacaggcatgctctaccaccgcccggtttatttctttctttaagaaatttatgcttaattttattttatttacctcatttccagttctctcccttccctcaaagttctcccatgtctcccaactctctttcaacttcatgatttcttctctaattataatcattactcatacaatctctctctctctctctctctctctctctctctctcacacacacacacacacacacacacacacacacacacacacacacacacacacacggggaggctggaacactgatgagtacaggcggtcaaaggcttcaaggagagtgatagaattcctaacaggctctccactcccaagtgagccccaaatgcatacaatggacagtaaatggactcgttcagtgtgtgtcttacaattttcatgaaccagtaaagtttgcaggtaaaacaggaagctcattaactcagggtcagcttgtgctatgcagcaatttcaaggccagccttggcaatttagtgagactctgtttcaaaacaaataaaggagaagcgggctgggggcatagttccatgggcaagcacttgtcaagactgggtgagttgctgggttctaccctcgtactgccacaaataagaaggtttgtttctcatgttcaatttatagcattttctggaccacagaacaaccgggagtgcaggttttaaaagcccttataatgttacatcagcagcacatctattcatttttggaagaaggctcctgaaagcacgttttagagtccttcaaaatcttaacttgattgcaggtggcagataaaagcaggggactctgtgggatggaaacccaatcatttaagaatgaggctccactggtgtgatatttaactgacagccagagaccgggtgactggaaggcaggtcaaattgtggtctatctcgaagcctttcctaatgttattattttttctctttatgagcagtatgctaaatcccaacaaacacagacagagacttattatttctaaacatgtttcaacctggtgggacaaatggaatgagttaagaggagtggttttcgtaggctggacgctgtaggaacagaagaggctcatgggagacctaggaggcctgcactgaatattatgactttggatttgagcagggtggtgaaggactgcagaaggggagccagcacttgagggaggggccaagcacccaggaggaagctccttgcccacatggaagtttctagagcttgtccttcagaaggcatcaggtgtgcaatggtctgctgcccagagcaagcctctttccagctctgaccctcagcttcctcacgtcctctgctcacaccagatgattgccgtgggagaaagcagggggtgttgagccacctggcaccacacttgagtaaattcggatcagcacactttatttctgcccctccttccctctgccagctctcttttctcacctggaatcttccatgcctggaatttgacatgcccactgcctgtggctaagtgagacacagtgatgcttcatgctgaagacagcattgccttgcttatttaacaagagtgtatatgaattatgtagctaaaatgggctctctctggctctacgtgtagcacctttttctaaacacctttttgtttagaaacaagcatattctgtaaggactttagtaaacgttcaaatagtacaaaaaaaaaaaaagtaacaaagagcagagctatttagaagtaaccttcaactctacagaccttctcatctacttcagccagtgataagaactggctttagactaacccagaagtgcagaaggtgcttggaagttaacatctccgtggcagtaaaagttgttctgaagatgactggccatcctggggacagtgccatcctggagtggcccccttcctcagagcaatgctcttggccttcaccattcagtaccccttcactgaccttgtggaagttacttgataactttgagaataaaaattaattgtcaatcaatggaatatactagaaaggcacacatagtttatttatttcttgttctgtattctcttttgatttaatttaaaatagtatacatccctattgaaggataggcttaaaaattttaaataactgggtctgaatgcatccaaattatgtcaccggttaccatgcaacaaattagtctaaaagtatgatgggatggattgacatgaaggggattgtcaggtagaaacagagtctgcattagcaggagcctcacactaggcctactcagccatgggcagagggctccgcatatcttacctaggaaagagcgcgtggttgcatctcccgaatgaactacctcctctgttgaagaacacagtccatccattgccaccctccccatgggattgaaaagtcctctcgtcacggtgcagatatgggtggtagcattgaagtcacacttcccacagtgtgctgtggcctccatggatgcagggcagactgttgcacatactctggtttcctgttggggaaagggacaagaaggttggtgaacttcctttagccagttaggatgcatttttgaatcatttgaacaaaatatttcactcttgcaataaacaaacatcttaaagcacatgaaagaaaatggtttgcataccaggaagagcccagacattgaaacgtggagggtttggattacattccagtgtcttcccagctctgagatctttgaaagcctcatcaccctgagaacatgcagtggaaactaaactcaccaggaaggtttggtctgtgaaccaaatgacctcaagcccaacgtgcctcaagctcagagcattcatggcaaataggaaccacagtctttgtgtgtgaactttggcactttcatgtggtattttggagaaaatataaaatggggtttctgagactcctcctgccttatagttctctctgtgtccagccgtatcactcatctttacctccctagtgctgggattaaaggcatgtgatcccaagtgctgggatcaatggtgtgagctccgtttctcttttagtctggatcaatctagtgtagcccaggctggccttgaacccccagagatctctctgcctctgcctcccaagttctgggattaaaggtgtgtgctaccactgcctggcctctatggctatggcttagctatttactctgatctccaggcaggctttatttgttaaaacagaaacaaactatcaccacaaataaaaggaaactgtatcctggatggctctgtggggcgggtactaagagggacgcctgtggtaagtgtgttcttatttagtgcatgcctgaatgaggcaagctgaaaaagacctagtgctaccgagaggagcagagagggcaccctggaaggacaaagccaggacccagatttaaaatggtcagagggaaaagtcaatcttcaaggcatacactagcaacaagcaccccatgggtccttggtgtttccacatagcaggcagctatgcaaaccctgctactgataattgatgggggatgtccttctgtatatatgtttctcttattggttgatgaataaaacactgtttggccaatagccagtagaggcaggaagataggcaggactaggagacgaggagaattctgggaaaagtaggcagagggagatcaagagagatgccatggagggacccagaggataggacacaccaggtgtcctctggtaggataaggccatgtagaaacacatagattagtagtaatgggttaataattaagacagagctagccaataagaagccctagccatcgaccatcagctttacaatgaatatatgtctctgtgtgctcatttggggctgaagcagcaggacccggtgggataagaaaacctccagcaacagataatacttgtgagggttcttgatcacaggactccttgccaggtgactaccctgctatgcttcccattgagagacagaccttgaccaggcacagcaagccctcagcagcctctgatgaaagaaataatgacaaacgataaagcaccagagattaatgggctcagtatcagcaacaacaaagcaagaagagtcaaacctgtgccaaataagcaaataataccattcaaacaacaaagcaaaacaacaaaacccaaccaaaccaacaccctcagaatcataaacatagctattcactccctccccaaccaaaaatccttaaaacaaaacagttctaatttttttaaaataatagaaaagttgaaagacaaatgtaaagcgatacctcaatgaggtgaaaaatgttgaattaatcagtggataaggaagagctagaaagagctagaaggaaaatattaaaggatagatttaagatcaggaccaactaagaggtgagaactaaggcaagaccagcagtaaactgttaagtgaacaatagagctgctctccccagaaggagaggtggtgagctccaggctaaaaggccactccgccaacacacacacacacacacactcacacacactcacacactcatacacacacacacacacacacacacacacacacacacacacacacacgcacacacacccaggatgcagctgacagatacagcgagtgcttgtttggcatgtgcaaggctgtgagcttcacctccaaagccacaaagacaaccagacagactgtgtccatgcggaggctcttttcatgaggtaagacaatgagagcatacctcaggtgaggaagcagagacgcatgctggtgctcagctcgctgtgtctgcctagcccagaacacagccagagcaccccctaggctagtgctccacctcagccatttccctcagaaaataccctcatagacacacccagaggtgtgattccaggcaattctaagtcccatgaggctgacagttgagatgagccatcacggttggcaggtccagcactcagggctgtgctgtgcagggccagggagcacggcactcagtctgggagcacacacttcctgtcatcccctcatctgaagtgctgggtaaagctaccctgagaacagctaatcattaggaattcctttagaattcattgcactagcatcaatcatgacaaactcattcggtattaatatggatagaatgcaaaaatgaataatgcacacatgaggttttatattcctattttagaaaaatagttatgaacaatgtatttctctttccatcgttgaagcggcacctccaagaggctttctatcaattaccttcatcaccattccagttgaaatctcgtcagaacaaacatatttcaaaggattatatccaactccattacagcatcgctggctctctggaataagttcagtatcacagcatttcactggcaccgggtcattctttttaacgtgtgctttagactctccactggaagcgaagcagcatatggtatctgacatattcacataatcctgcccacaacacagcatccctgcaacaataaaatgttatatatgaatatcaaataaaaaaagggaagaaaactgaggcagctgtaaagcttggtataaaaatgtcagacttgggcagtttcggcgaaggagccctagtaaaggtagcatttccccaccaaggtgatttagatgtgcgatgagggcccatcttaccaagagtgccgggcactcattaggaaaagaacacacaagaggaaccgttcggaaatcattcagctgggccaggctctgcccgcactccactgggataaaaaaaaaaaattgggtttctgtcaaaactgcctgccccttttgtgatgataacatcatgttgcacaagtaggttagctagattaaaagatcctagagagaaagctctagaaattcacaagggaggctaggtcacccaggcactctgggataagagccaggcagagtagaaatgtagtgacaagcagatgagcattcctggctaagggctgtgtgagcccctgtctgtctttgcctggggtgtggtatttgtctctcatgaagtctgaaacagctgtagtcttgtggtcttcctttctcccacaattagattgggtatgcacaaccaagcaagggatactgctcagctggtggcgtgtgtgcctatgtttggtctctggtcagtactgcacaaaccagatggtggcacacccctgtgatgccaacattaggaaggtggaggtagacaattaggaaccaagttatttcattggcgtgctgagtgtagggccaattctgtggtacctaagaagataacaacaaaaaacaacttgtcaaaagtcttcaacagctacacccctaataactcacgtcaaaaaggaagataatgagtgacaccaacagtgaccacaattggccaagatgcagagatgcagagacacagaggctatggaatgctcagccctccatggaatgtgtgccacgagccctcctcccaaggctcagagaccactgtggaatgatggttagggagcgggtaggaggctgtggatggctccaaagaaacactgtcttctaaattcagcctcgaagtcaaccacagtggctatgatgtcatacacaatctcggggcaagccaaagtcattgaaaatccctgcactgagtagggggctgggcgggaagcctctccattacgaggatcatctggtgggaagcgagggtcactcttttctagagtgtgctccttggtaagatggtaactctctagtggaaggccagacatttaagaatttatttaggaagaacaaactgtcattggtggctttaaaagataaaaacaaaggacacaaaactgggctggtaggggacatccggaaggagtcaggtgaacacaatgagaacccattgcacaaaattataaacaagtaaagtacaccacaaaccacacacacacacacacacacacatacacacacacacacagaaaagcacgcacagcagctggtcactattttctgagcctcacgaagctctggatctaccagataacatgtttgtaaggctggggataccgatgtaagggagggccacccattctcacatcggaagagacaaatatacctgaagggccaacagatttttctcccactgaccaaatgcccatcatttgctgccatagaagcataaacgtagacataaaagcactatagaaataaacactaccccggccggattacgctagaaatcaaggtgtctaggtgacatgccaccatgctgtcttactagaatttgcatctggctgtaaagcagtgcaacctgatgaatgattcattttaattagagttccatttgtttattattaatcctggctgataacacaaagaacttcagatttcaagtggtctggggtcgtcaattgtttaatctggtcctgtacaaacacccgtatgaggcacagcactcctaacgacagtccaaagagttttcaaagctcaaaacaaaaagcattcagaagacctcaatgttacaaatctcttgaaggaagacactattcagtcagggctctgaagagccatcacactactgtttagacttcaaatagattcctcaatatctaaaaattgtatatatgacaatttgtagaaaatggccacagagctctgatatattgtgccaacctaaatgtgacaagtcctcaaagtaactgaaagtaaaccatgatattgataagttttattttcattcctagggcatgctctctataataagacacgcacaggcgtgtcctcataaactgagtcttaattatgtggataaagacaggcatattcatgcaaaaatgccaatgcctacttataaatgtgtgtattctcttacacacaaaggtaaaagcaaatgccagggctttcatttggtactgtttggacattccttttctgctgccttcagagcacatatttaaatacaaccttggattcctgactgtcacttttttttcctattgtaattttcttaaaactcttcatgtttccattttagagagcaatcaaaacctgaagactggccttccagggaggagaatacactctcccctccactctcaaattactgcatggcttcaccatgctttaactatgaaatcaaaatgcagacattgacctaattcgaaaccctaatcagtcatctgatcgctctgagggacttttgacaggtcaactaaaattctgataatgaactgtttttatacgagaggagagagggaaaaaaaaaaagggatgctctctttgacaaagggcttcatcttggcttttctgaattgaaaattttcaggcaagatttccctcacataacaagaagtgactccctttctagtttccttggtaaaccattgcttctttaattattatcaaccttgttccagtgtgataaattgctaattacttaatactctaatcagcgttcattctttgcatagataaaccatgacagtgccattaatttaaatagtaatttcacttaatggccagaacggcacaccagatttttatgcagcatcttctgaagtctgcatccatcactgtgatattctgacataaagatgtctgacgtgcactaactcacttagggagagcagatgttgcagtgtggggcttggtagtgatacccatggtgcatcgcttcagcatgaatgagctgcaaacccagagacagaccagcttctgcaaggcatggcaacaacctttgacccctgcctaatttatcacatacagcacttgacttttgaactttgacacacagaggtcagtcacaattttaaatatgctcaaagaaaaaacgaaaaggcctcgggtttttgatggcttgctccattgttccaaaggacttatgtgaatatggagagtgtctttgaacaagacacagatattagcaaggtacacatgagtaggtgtttgtatttcagatccacttgtgtacacagtctttgacatcatgtagacagtccgtggatggcttctgttctgttgtagacagtggaaaaacgaactagaagaagtttgaaatcatattatcaggtctagcaccaatgtttatttaatgtccaggagtaatgagggaatatttgtcaacaaatctgtctgatgatttgtaagtagtttaagtcttaaaaaatgactaacaaataaaccataaaaacttctgaggtaaaaacagtaatgcagtgaagtcagtcaggggtaaggaaactcatattgaactctaggcttgaccaaggaccatcatattttaggacaagggctctgtatttcaggcacagaagagagaagaaatggattacaattagccttcaataaagcttagaaatttaggggccaagcacttaaaaaaaaaaaaaaaaaaaaaaaagacatccttgcttgtgataaccagtagatggcgctatggccaccatcacggaatagaggaagacagtaagactgctccccaaaccacagccatacattttagaacatgtatatactatattttcccaaagaccatcagggctatatggagacattttgggagcaatctctttcagtcagctcttgtaccatggattcctgtagctaaactcccctgcttaaaaaaaaaaaaaaaaaaaaaaaaaaaaaaaaagaaaagaaaaaaagaaagaaagaaagaaagaaagacacttggaaattccattttaggaaaaaagtgttcatttttctggaagtttttattaatttttctcaaggcagagtctagggtggataagcccagtattttgctatgaaaaaaatttcaccagtgttgcctatcaaagactgcgtggacttgatttataacatatacaaggaaacgttctaaaggcagggaatgatcttgttcatggctaacagaaaaaatctccatcctctctgaatgatagagaaggttttaattttgtcatttacttttaagggatgtaccaagtccaagccaagattaacagcatccatgataaaaccatacacgcaaaaacactaagggaaaaatgtgtaataaagagatctaaaatatatttggaggaactggttaagaatacatatccacaggaatgactttcatcccaagacacctgtataacactcccacacagctcacccgcccagagagagcactaaaaaacataaacgccaccccagcacttctgctccacagcatctgttaattcactccatttataaaatacatattgacaaagacaactgaacagggaccagggagatttgatttggtgtgagaaagtcaattcaatgtgattttgttaaagggctcctgcaggcaaataaaagagtttaaggaataaagtacataaagagatgttttacgagcctggccggtgtcgtggcaggctcacaatgccaggcggtgggagaggccgggttttggaactgagtattaagagcctggccttgtccggcaggtatggagagtggctagggtgcagagaaacaggtctgtgagtggacacgatcgtctggggagaccggaaggagagacagcagaggagagagggctcagaacctcagggtgtctgaaggtcgaagtgataaagaggttctctcctttgttttacaagtcctgagcctccgcctcctccactgtggccaccagagttaatggaggtgcggagggcactgcagagacatgtctgtcttgccccgtgggacttgaggaatgtcacccttaagaaaggtgtcagtgggtgctagtgagaggactcaagagtactcagcagttagggtactgctctgacagaggattcaagttcagttctcagcacactcatgtcagctgggtcacaacgccctgtgtctttacctctaggggatctgatgctctgacatcttcttatggtctccataggcactggcaaacatgtgcatatacccctcacacacatacatacacctaaaaataatttattttaaaaaagaaacatttgacaagttagctattaccaccacactgaagtgaaagggttgattttgaaacttagtctatggggggacttgaagggtgtagagatggcaggcaatttgcatgcttgcttgtctgtatgggtacatattgcatgcacatgcaagtgtgtgttttcaatgcacttttactgaaaataagaatctataactttgagagaattctccagaaaggttaagaattcatcctagggggtagtcaccttaaccctgctttcctttctggcaacagtgctctgtcatctcttttctccttcctgtttttctgacacccacatttaactagtcttcgtaaatcagagttatggcaatcatatccagtcttcctggagcactcaccaaaccctggactgcctaaaacctgtctccctctgtttcatggcataggtaataccctgcccattagccaaattggcatcatgggtaccaactccccactagctcaagagcttctctccagaccttactcagtgtttaggattctaccatattggtacaacttagcttttcttcacccacttaatgaggtcatcactctttgtattgctttggagcctgtcctggaactcactctgtagaccaggctggcctcaaagtcacagagattcacctacttctgcctcctgagtgctgggattaaaggcatgcaccaccaccgcctggattatcacttagtttggaaatggtgcacacattagactactggggaggacagggtgggtatggggcttggagaggagcatggccaaggcccgtggcatgcatgggtgagaaaggcataacgaaattcatcagctttcacaattaagactcagtagcaaacacggaaatgcctcagagcaagaaggaaagtagttcacagcctaacacctatttctcttggatgagccagaaataatacagatttgggggaggaaatgaaatcctaaccattttttttcactcaaagggtgatttcttgaatatagactcagtaattcttgtttgttgaatgaaaggatttggcagcagactaattaagaggaaaaaaaaaaaaaactacctgcctgattagtgacatacactttgcaatcccagcacttaaatggctgaggcagaaggatcaggagttcaaggtcatcctaggctaagcgataagatccttctttgaagaaaacaaaacgaaaaccaaagccaaaacaaaacaacctttgcttatgtgagttaaagcagtattctgtcctagaatcaaatccacttaaaataacaatgaaatcataatatgtaaagatagatttctgaggtataaatatcttttccaaatcctaaaactaaatgaatcagtgaaaagaatgaccctatctctcatttttgtaagccagtttaagatctactgttaacgacagaaactgaattctcccacaagcttctctgtgttgcaatagcacattccataaagtccctgggaaacaacactggacggacactcagagaggactgggactccttagatgactcggtggctcacagtgcttgcatacctgaccttgatacctgggacctccatggtgtaggaagagaactggctcccacaagctgtcctctgacctccacaactgactgagccatggcaagcatccccatgcccctccaccctcagatcaataaacaaataaatgtaataaaacttgaatgcatagattaatttaagagtattataaaaatagttttgctctcacagacaacctgcagagcttcagtcacttccataaaatgctcctaaggctggagcctttaggagatgcagagggtaaaaattcaaagactgctaaaaggtgtggtgagggaaagatgtaaaggaaaaaatatatgaactaaacatggggaagatgaaaaaatggtggcagaagagatgtctccactggacaagtgtttgcctaagtacaagtcctgagttcaatccccagaagccatgtaaaaaagccaagcattgtattgtagcacatgcttgtaatcccagcatgaagaaggaaggacaggcagatcccggggcttaccagccagcaatctagcctttatagaaagttccaggccagtgagagacactgtttcaggaaaaaaaaaggtggaccacttctcagaaatgacttccacaactgtcttctggcctcaacctacatgtatttgtgcacagccacccctacacatgaggggacacacacacacacacacacacacacacacacacacacacacacacaccatgaaaatctgtatttaattaaaattatcctgatatcaaatggagaattgaaatgaatctcagatcattcccaaagcagtaatactgaaatgaaattctgtattgggactcaaatcaatgtgcctacactatgataacacaaggcttgctggtttgcaggcgggctagtggcatcgaagatacctcgactcaagtgggaagaattaagagtttagaccagtgtttcttaacctgtgggtctcaaacccccaggggcagggaccacatatcagacaccctgcatattagatatttccattatgatttatagcagtagcaaaattgcagttatgaagtggcaggattttatggttgtgtgtgtcaccacaacacaaggaactgtgttaaaagggttgcagggttaggaggatggagggccactggtttagacggacgccacgcactgaagagttagttcagtcaccccacagacctgagtctcagaaaagcactaccagagttaaaaatctgaaatactctgccatcccaaggagatcctcggtacagatttccccaaatctgataacaatcctatctgtttctgtagcattatcgtaatgagcggaagtgcttaagaccatgcttctagacttcaagtgtgattttaaaaggaaattatgatcaaccatgtgagatggaaaaactgaactgcgatgaaagtaagataaagtgccagggtcagctgggtgggcaatcaagagtgaatgcaaatcaaggtgaaggatgccaggaactgtcggatatacatacttaaataaattgtgttggagactggagagatgactaagcgagtaagagagcttgccacccatgaagccctgagtttgaatctctggaacccaggtgaacgtttgggcgtggctgcacacacacacacctgcaaccccagcactgtggattgctggagttggctgccagcctagttccaaggccagtgacagatcctgcatcaaggtcataaggcagagagtgatagaacaggacagtggatgtcctcatcaggcctctgtataagtacacatgggtatatacaccatacacacacacacacacacacatacacacacacacacacacacacacacacacacacacaccccacaccacaccacaccacattagattatacaagaggggtttcctggacttctttcaaaatttattttattattccaagcaaatattcattttaaatatcaaagattaaatatcaaatttgttccttaccttccccaagttcagaccacccaaactctaccctggatcacttatataatctccaggaggactctaatgctcacatttcaatttccccattaattttattactgtcattattttgtggtactgagaatcaaaatcagggcctcacagacactagtaagtggtttaccactgagtgatatagcctggcacctttcctatgctataaaatatgaattcaaaagtatcatctatttgtagggtagctataaagattaattttggcagtaatgtacataacaacagacactaccacttggtaataaggtctcatcaggtggtgatgcttactattgatattagtactagtttcctaggaacctgagaataaaaagtaaaagattaacatctcaatatcactgtaattattttttctagtattatgaattaataggaaacattctttcatccagagataatacatttatgcgggagtttgttttgatttcatgtatctttttggtaacattcattaaaaagtttttttaagatatattttttcaaaatgatatgtgcatgtgtgtgactatttgcctgtggctgcagtacccatggaggccagaagagggcatctgatcccccgatgctagagttacctaccagtggctgtgagtcccaccacacgggtgttgggaactgaactgtaggagcatcgagcgcttttaaccactgaagcatttttccagaccccgccccccaacaaagaaattagatgcgtctttatgaagtggactagatacacttaaaaacaaaaggagattttaactgttacatagtgtgttcctaattgtttcattagatgcaactaatgtgggttaaaattatttgttttatttctagggcaaattcctcctactccctgcctcagctctctgcctcctataggacagacagggggccttacctgggaggtgactgtacaccacgccctcttcttctccaccacagcacgtgaaatcctggctcaccatctctcttccacagcattgctgcccgtagctattgtggagccttccagcacagcacacctggctcccagaggtggcatatggcattctgccacaacaggcatcaccgaggcccacggaagctcggttgtgctgctcatctggacagcatatctctcctgtcagtttaggatggttaacagttatggcgtgacttaaaatatgctgtaacatagctaagttgcatggcttctacaaggcaaatgaccaacagaatgcctggagagaacattgctctactgcggttggttgcaaaattgcaacacatccctcaaacttttgcatgaaagatggggtaatgggtgtgtttacttacatccatgtgtaacacagataaatggaagacccagagacggctttggggttcaagctgaagatcagggaagcaaagcagctggccactagctctcacctcttgctcaggctgatccaagggctgatccaatcatgagctctttaccaagtcccaaactgctgcctctcctcagcatggctagagaatgaatgcctgccctgctcctgtcttttataccgctctagtgctgggattaaaggcgggaactataattctcttttagactgattcaatcttgtataggtctgggtggccctggactcagagatctgtctacctcttaatcctgagtcctaggattgaaggtgtgcaccaacacctcctagcttctggctgctgggattaagggtgtgtatcaccactgccttatctctacagcttgaggctgacttccttttctgaatcctcagccaagctttaataaatggtaaactatatattactacatccgtgtatgctagctcaggggtagggctgtcaccttcctcttagccctcttcagatcctaccaggcgtgtctgaccaacgcgattttgtgctgggtcacgttcatcgctacccttagtgctgcagtccataaaccacaggtcgcatgtacctgccaggacagactgatgtctactttactgccatatttatatacatatgatgttaaatattatataaaatccaagacccacaaaggagaaaaaaattatggtgttattttcctgaaatggactggcttcataaaattatctccagtcccacccacttgccttcaaacatgagtttgacatttttctatgaacgaaaaaattccgttgtgtatgtaccacacttcctgttctcactcctctgctgctgacactcaggctggttctgtcactcagctcccgtgggtagcgctccagtaagagtgctgggatgcttctgtgaagtcctccaggtaaatacccggagggagggctacatcggggtcatgtggaagggctagctttggtttttggaagcacctcccaatggactcccatatgactcttttgtttctattttcaccatcagtacacaatgcctcccctttgtccagcccccttgtccacatccttgccagcatttgttgctatttgttttctgtgagaagtgacagaatctcaatgtcgtttcagtttgcacttctctggaggctggctagagaggttggaatttcccttttcatatttattgaaaacttgagagctgtcgttcattgtgaattatcaactcattccatcaactcatttattatgttctttggtttcttgcctttttgagttgtctattccagataggtagttctcaacctgtgagctgcaagcttcacggggtcacacattggataccccgcatatcagacgtttacattacaattcacaacagtggaaaaatcacagttatgaagtagcaatggatgggggtcaggacaacatgaggaacgtgttaaaagggggcagcattaggaaggttgagaaccatgcagaagagctagatatcactcccttgtcaaggccatagctggagatggacgaattctccccttttgctggatgattttactcagccatttcttctgttgtgtagaaacttgctcaattcttgaaatctcacttgtcatttgttgtcacatattcctaagtgacgaggtaactgttgggatgtccttgctgatgccaatgtcttaaagtgtttccccactgagaaaattattccttcgtaaggatatatttacttaaccaaacaaaacgcttaaaacaggaagataattaagcgagtggaagtaaaatattatatttagctaagcacattcataatttgcagggttatgagagataataaatttccctagagctcatacatgcacaatgtcagcctgcaagattctgagaataaagttagcatttaataaatttaaataaaacaatacctcagtccttggcttggtatctcaagactggaaaattaaaaaattccagataccaagtttgttgttgctggttttatacagttgttttgtttttgtttttgttttggtagctttgttttggtatggaggggccttaaagagagaatttacaaagctgcttatcttgggggtatctcagaaatggctgacaatatttggggtatctaaaccatgtacttctgttcctctttatttcccatgatccaagtctggttggttttcttcttgcccccccccccccaatcttacttccttctcccttgcccatctcttctttttatcacgcatctccagcagttccttcccgtctcctgcagtgcctctagtgtgcacatcttcttctctggaccctattccttgactatatccccaaggctatgagtatggtggtcatgacaagtagttgagtggttgtaagttgggaggttgaggttttatatgtaagtgacgaatcaccaagctttagtaaggaaaggcccaagttcagtgcgaactgagagagcacatggtcttgggtgaccttgttctctgttaattagttcatcttctcctgagacctacagtgtagagcaagatgagcccataagaaagccatgggacagtgcctgcctatgtttggagacacaaagagcaagaaaataagacaaggattcattgcggctatcctccagatctttcctgtccaaattcagtgctcaaaagactatgtttctagatgatagcaacaaattgctagaaatacaaacttaacaagactgaataataaaatacagaaaatctgaagagactcagtaattcataacaagattatataatttaccaagaaactccccacaagaaaacactctggacagatggcttccttggtgaatgctacttatacttaaaaaaaaaaaataacaccattgtcttcttccagaaaaattgaagaatggggaaataactcctaacctaaccatgagttatacaatactctgatactaaaaccaggcaaagacacttagaataaaagagacctttagatgacaatcccataagaatactgattttggaaaaaaaaactagaaaagaaaaatatcatgtaactaaatttaaagtcatattaaaagaacaatacttcacgaccaagtaggatatattctgagaatggaaaatcagtcaacaagacaacatggtgcagtggaagaaatttcatcacagcacaaggcctactgtgtgagttcagtatctggatcactcagtggaagcagagaacatacttctacaactgtcctctggcttccacaaaaacaccattgtccacatatacaataacaacacagttcagaaagattaaaggcatttaaaattatgtgtatggtgtgtggggtatgtgcatgttaacacatgtgcctatggattctcctgccactgagatgggtgctgggaagagaactcaggtcctctataagagtaatctgcactctgaactattgaaccatctctacagcctcatcaacaaattttttttagaaggttagcaaatcaaaataaatacaacattgtcctaacaaacaaataaggggaaggtggggggcatgttctcagctgaagtagaaaaggcacaagagaaaactatgtatttcattatacacaacaaagcaggatggcaaggaaactgcctcagcatgggggggaatatgaagagacgccatctaacagccaactctaaaccaaaagactggatggtcttctaagatcagaaggaggcagagaccctggccctggccttccacttctcattgtagcattgggtggtggccagagcaattacacagatcaagaaaaaaagacatccaaaaccaaaggggagaggcagaaccatgtgtgttctcggacaacagggttcttaaagggactaagaaaagttaaacatcaggactgctcaatgacttcatcaatgtttcaatatgtaaaatgaacacaaataatccatgaggcttctacaacataagaacaaacagtttgaaaaacagtaacatttaacacagcatcaacagtataaaattcttaataatgcgtttaaccaaggacacctgaacactgagagcttcaagaaacttcctactgtaagagcagtgtaaggtcacgggtgggaaacgactgttgtctgtgctaacccgggtgatctacagagccaaaatgatctcagtcaaaatcctgaggcttctttcagaaatgggaaagccactgtaaaattcacatggatgccaaggaatctcaaatagctaaaataatttcagctaagaagaaagtcaaaagtcttctactttgtgatttcagactctagtacaaagctgttgtagtaaaacagtgcagggctgatataaagagcaatgcatggctggaaagaaacagacagtatagcaacaaactcacccctggggtcaagcaatctgaaacaaagctgtcaagaccacccagtagggaaaaaaaaactttcttatttgcacaattagtgttgagaaaaagcaacacacacacgaaaaagaagaaagtaaaattcgtactttatcatatgccacaaagatgagctcaatgtgtactgaagatcacagagtaaaactaaaattcaaaattcttagtagaactcaatatggacaacctcctgtcatggggctgggcaatgatttttaaatttgttttggctataacatgaagctcacagaaataaaaatagatgaatttgtatctgtcaaaatctcaaactttttggcatcacagtagacaatagggtcacaaggaaggcattgggaaaaatacttggagatcatgaaataatgtgggattacttgagtgatttttattttgatatacaacaaaataccagaaaccaaggtctatttagtgcatatttctggggttcaagaacatggcacaaacctgttctacaaacacaatgacaagaatgtatgagtgacaggcatggcgggctcatggccagatgggctggagaactgcagaggccatgtactctaaacaacaatctttgtgagctccaactctcaggaatggaataaagttccagaagaactgtattagtgcctttggcacagcaccctgaataacccccatctctttccaacagttccacctctaagaggtccgaaatcttagcaaaaccaccacacggagggccaagcttcaaatgtgagcacttggagacaataacacagcaagaatgagtatgaaaaatatatgaagaacacatacacctcagcaacataatcttgtgcatgaatagacatttttcaaagatactgatagcctctgaatcacacagaaagatattcaatattatgaatcactagggaaatgtaatcaaagccaccacttcacagttacttacaatagctactactgaagtgacagacacacagacatacatacaaagtcagaaaataaatgttagcaagggtactgattcactgtgtttttttttccataccccaaaggtgaaagaatccaaatgtctaagtatataacaaaatgtggtgttttcagacttacaagaagagtgaaattctgacacaaggcacaacgtgggtcagccttgaaaacatgctaagtgagagaagttaacaacagaaagacaattatgggtgctccaagtatatgaggaccttaaagcaggtgacatcagaggcaaataacgcagggtctttgctatgatgttaccagcagctaatgaaggtggaatgagcttgtaaacagtgtcactactggattattatacatctttatatttatcatctatcatttttctaatctgtttatccctctgttcccttacctacccatctcttacctatcatctatctatctatctatctatctatctatctatctatctatctatctaatctatctatctagctatctatcatctatcatctatctatctatctatctatctatctatctatctatctatctaatctatctatctagctatctatcatctatcatctatctatctatctatctatcatctatctatcttatctacctatctattatctatctatctatctatcacctatctgtccatctatctattaattatctatttgtcatctatctacccaccctggcttcctcaggatagaacaattttctgtctagcctgagatgtaattaccatttttcttacatcttatcagccagagaactcagagtcccttagaggccaacttaaagtggtacatggttctgagacctgaccagttagccattacctagtgtagttgtgggcttagagaaaaatatgctgtttatgtccatattggggaaagacaaacttctttatgaaacctttcctggattggtattagtatttgtgttaattattttagtcatagttccctgaattcatttgctgactgtggaaaagtttaaaaagagagagagagatgtattacatcaatgagaaatgaagttccttttcccctcaaaaaaggggctattagacccgagatacaaggaccagtcaccccctcattaacctctaaaaatgagtcttttgggccaggttggaagatgttttctctctaaatggtgccaagcagcccaacagttcattgttattcttatcaaagaatgacccacattaacacttctctgaggtcattagcatatttataaaaaaagtggggcgaacaagtattcccctctctgctgccctttgtgatgtgtggctgtggagcaaagtcttgagaagaaaaaaggagtaatattattaaccaatatttcaactcctttataaatatcaaaacgcctgtacgcatcccccagccttaagcatggagactactgattggattttaattacagtaagatacaagacagtttgaggtcactacatttctttcttgatgtaaatggccttaaactagttaacaaagaccatgagctgaggacccgggtcagaaaagcatcccttcatttagatatttagatatatacagattagcaattgaagcagagccctgattctccctcgggatgccttctttatgtttttttcttttcttttttcttatcttgacaagataggacaatgtaacactgtggaaaacaactgcttcaaaggatctgagtgcagtatgggctcagcagttcagcagacactgaaatgctttctacgactcagtatgtgcggtgtgtatgtcatatatgtgaatgtatatgtgatacacatgcatgaatgcacatataatttttataggttacacacacacatacctatgtggtttggagactttacactcttgcttttaaaatcagttattaatggctggcaaaagaggttaattaaatatgtatgagaatccaagtttggatccacagcatccacacaaaaaccatccatccatccatccatccatccatccatccagccagccatccagccagccatccatccatccatccatcaatccatccctccctccatccatccatccatccatccatccatccatccatccatccatccctccatccctccctccctccctccctccatccatccatccaaccatccatccatccatccatccatccatccatccatccatccacctatccatccagccagccatcatccatccatccatccatccatccatccatctatctattcatccatccatccatccatccctccctccatccatccatctatctattcatccatccatccatccatccctccctccatccatccatccatccatccatccatccatccatccatcctgtagtctgtgcctgtcattgtggtgctgaaatgcagagacaggagggtcactggtccttgttggccaaccaatttagttagtgccaggttcagtgagagaaactgtcttaaagaaggcagagggtgggggagttggctcagtacataaaagcattttccagtcaaacttgactacctggagtttgaccccccaaacccacacaaaaagtaaggtgtgctagcttacatgtctatcccagtattcctaaggatagatgggaaaaatagggagttggccagaagtttatgggccacctagcctgggacatgctgggtagtgacagaaaggacagaaaccctgctccaacatggtgagaggcaagaatttgatactcaaaagtcatcctctggcctttacatgcacatattttgaggcatttgtgtgtcttctctctatccacctgcctctaacatgcatggataaatttaaaaccacttttaaggttgaggaagacaatgactgctacatttaatttgcaaaatacacacatgtgtgcatgcatacaaaacatgcaaatatatcacatgtagacatacatacacatagtcaattattcaaaggattgtattatatcaataaaaagcccattggtttccatttatttaatttgttgaaaaaaataaaattttattttgaagcagaataaaagtggattgtgtccttagttctaagtcgcatactgttgggcttgaagaagcataagcaggtggattttttgtgttaaattgctaaatgggagcacacatttatcattacttttgaggggaagaattattttctgacttggtttgtttcaaatgataatatcaaaaatttcaaagtgactttgaaaaaattcttttatgtatccatataagctatttttactctatttagtggtatgtgggactcagaagatcctcccagggtctactggcatggagaaagctaagagcagacatcaggaaatgcccatcccacttctctaagttttaaagcagttattcacaggaagaaaagagaagacttgtagttgaaaacccccagctgtggacatttggagagaagaggactcttgacagtgctttatttgatcagttgccaacaactgtgaaccagaatttaataaacaagtcaacactcttcaacaaaatccttacactttcaccaacatatttccttttaggaaagattgctatgatctattcaattatgaatatgttcttgctggtgaatcagagacaataacatttctataaagatagattttttttgtcctctgtgagttgtagggggaggagaagatggtcagaatgaaggttcaccttcatgaataaactccacatactcaatcatgatgtttgatcccatattttgtaaaagaaactgggtcagacaattcctcatatcatacatatatcatatacatatatcataaatatatacatatttactatgtatacagtgttctgcctgcatgtatacctccaggccagaagagggcactagacctcattgtagatgatcgtgcaccaccatgtggctgctgggaactgacctcaggacctctggaagaataggcagtgctcttaagctctgagccatctctccaggcctaggtggttatatttatatggaattcaatgaagacttagacatcaacacctcaattaaccacatatgtagcacaaactttatgttccacggtgcatctcagaacactcaggtctcttagggcatctgaaaaatcacgctcttttctcttccaaattcatttacttgtctttaagagagacatcagtgttctggggctagagggacagcttagtagttaagaaggcttgctgcttttccagagagtctggatttggctcctagcaggctcaaaaccatctataacaactccagttcttagagctgggacacatggcaacataaactaacacagacacatattaataaacaagcaaatctttaaaaagaggaaagtaccaatgggaaactcaggtgacaggaaaaaaattaatatttagagtggcttctctagtgacagtagaagcttattggtctagaataatcttttttaaaaagtcaacataggttaatgaagtagacaggaaccacagtgggaacgagaggcagacagattttggggccctaatccacaaccaggtagccactctaagtagtcctttccctccctgcccagccatatgtggaacatactatactttcttctttcccttccactcatatcagggacaaaccctgctgagtacaaaatgacaatgtcatgatgtcacccaaacaagctggttgctgacccccatgagatagggaaaaggcaggtgtagaagaacaccatcctggggtaggactgctcattgggtaagaacgcttgccatgcaagaatgaagaacttgaaatctgggcgtggctgtgccaatctgtgatgggggaagtacttctgtgtatgtttatcttattgattgttgaataaaatactgtttggtcaatgagacagcaagttagacgggctagaagtcaaagaggattctgggaaatgtagtagagaagtgatgattcaggcaggaagtgacatagcaaggagactcatatataagtgaaggagaaacaggaagggtccctttttcccctctgctcctgctccagcggcacaatgtgatccactggcaaggagggacgccaataaggcgtccgataagataagtcttataaaatatatagatttatgataattaagactgagctagcagatgagaatcctagtcattggccaagcagctttaaacctaatacaagtttctgtgtattcatttgggcctaactcgggcaggaggctggcgtaaagcacacacatggcggtggggctcaggcagcttttggcagaaatatttatcgtaacaaatctggatctggattcctgcagctttgtagccaccagctagactaacagaataagcctcaacagaataaggcaagggtagagagggataggccaggcagtaatgggcaatgtcttctggactctgcatatgcctgcatgcatatcacacacacacacacacacacacacacacacacacacacacacacacacacacacacaattaaataaataaattccaagctcgtgactaataggatgttacacaaacccaggccaccagagccaccagaccaaaggcttgtgttctgctttgttggaaggcggcatgaatcttctaatcagcaacattccctccttggtggcctttctctttcagaggaggccttaagctgtgatggtagcccctctgcctcccggcttgtttctatatcactgaagtggaagcaccctctcttccccccaactaacatcacaagcatgctttgatggcagagtggtcaagttctcaaaatggagtgtggattgtgagaaaacagagcagcactccaatttggagtcctcatcccatacaccagtcttggtgtgttagtgatctctttgcttgcttacttgtttttcaagacagggcttctctgtgtagcttttggaggctgtcctggaactctgtagaccaagctggcctggaactcacagagatccgcctacctctgcttcccagagtgctgggattaaaagcatgcaccaccacacccgttgcagtctcttctaaacccatttcttgtaaattgtagctaagttaggcaataaaggagattttatgcaaacccttaaaaacaaggcctgagatctttgctttattaattgtggatgacactgtcctcactccctgtaacatttataggcgacagggcactgttttatgtcatttaaatttggaaaacaatggctagtatacttagtttacaatattaacccctggagtttagaactctcacctaaatggaacctgcagttattatctattcagggatgatgcatggggttctcaaaagagaaacagaggactggagaaaagtgtcaagggcagggcagcttgttgctttcctcattgctacgacaaagtacataatgaaacaacttgagttaggcagggtgatggtggctcacggtggaggactcattccctcatggtggggagggcctggcacaggggagaggtcgcattgcatctgcactggtggagcagaggggaagcattcggtgttcagttggtttccttctgctttctcttctcttcattctaggattccagcctaggggatgctgctgtccacactcagcctggatttttctcttctcattaaagctccttggaaaacaccctcagagctgctgccaaaggtgtgtctcttaattaatgtcatatccagccaagctgacactgaagatgaaccttcacagacagttcatgattcacagatttgatgaggaaacactgaagtgtgtgaacaaaacaaagccacaagagattgataaggagtggctgttgataaggagttgttgttgatgttatttgtgtctacagtggacattagaagtctctgatgcctctttctttcacttctagctgtctttcaacaaagccagaggaacaacatttcaggcaaacagctgactgcgcccttgtgcctcaggttttgatgggaaggcccttgaagtagctctgtgacacaggtcacaggtttgtatcttcagtttccctaagctgctgaacactgagggacagggcactcacctgggagaactctaacataatacccagagcagcactggtgatctggccatgcctcgtggattcggccaccacaacaaactccagtggaattccgaaggaatgcgatgtatttctcctcacagcagcggtaaccaggtcgagggtcatagagaagtccatcgcaacaaacctaaaagtttagaatcagtttttaaaaaacatttaaaaaataagcaattttacatttaaaaataaatatatccatttaattaagaatattgcatcccatggagcataagtattttcttcaaaggccttgaaaggtggccatactacctacagctgtaaaaacgtattctccagcatcatacaaattccataaatgtcagttgacacagtgcagctctccttcccttctccaacctagctttgctttgtgttacaacaccatggaaatgaaaacgtaaactacctttagactgccaatgcttcagtataaaagcacttaaaattgtaaatgaaccatttccttcacacatgaaggaattttttttattcctttattctaatgatgggttaactggaaaataccacaccagtgcaaactacttcttgctcatcctttttgttaaataaattgaatttccttatagtgtatctgatcatttatgtatggaccccaattttccaataagacaatttcctctccctctccttttcccctctctgtatatgtgcacacatctgtctatagatacatatatacacacctatgcaaacatatatcacagcaatcatacaccatagactaccacagcacaaaaacaaatttatatggaaattaattttgaaaagtccttttttactgtgtttttgccaggagctagctacagaaaaaattatatgcttgaataatcaaataagtatttgtatctttatgctctatataaaacaaatcaaagcctgagtggtggctggaaagtagctgagaacttggacttggtaagagtcacttcatttagatacttcttgtgggagaaaaatcaacgctgtttactgagatcttcccattgctctcttggtgatgcctccatgtggaagcaggctcagagccgtgactgaaacatggcgtaagtcttccacagtcccattcactcagtctctgatctacagagttatctaaacacaaagaaatggcctctaacccagccacctttcctaaacaaacagtaatacattttttttgttggatttagttattagccatgagtatttaagacctgtcttgccataagcataaattggacgacttcctttcaatgccatattctgcataaaaagtatgcaaagttatataccatgcctaagagttctgagagaacactttcattttttaaacaatttctaaacttttcatcaaaggcactcgatgtcaactccctatacaaaaaaatatcacacaagatagggttgtctttctaaaagttctgcattttaagttgcatatattttatattataaagagtttctttctatatacatatgcacacacatgtatattacacatacaaaattgaattaaagcataataattttagagatataaaaattgtaaggttgccaagtggctggctttaagtgtctcttacatagtaaatagcactgagcaagaggcagccataataacttgcattttgatccatattgcctcagaaactcactttattaactctggagttcctttctagtgaatcttacagatttaggagtagccttagtcaacaagtacgcaatgctgctgataaataggacattatttcattagatgagatcttaccttcaaatcaagtcgttttgtgtgttgtttgtcaatataagccatttacaaaaccctctgtctggctgtattattgatctgattcctaagcagcaactaatatgaacattaatctacaaatgatcataattctaaaatatttctgacacaccaggaacagtccactttatggcaatgtatcagtgttgtgggaaaacaaaataaaacaaaacagccatttgtagctgaatggatttgtataatgaaaatttcgagcccctcaagctgatacaaatttagggggtccttaccatcctaataaacccatattttctgaaaagatgataaaaactatgaaggcccaaatgcttatgtggtcaagaggattttgataggaatattttcttctttgtgtggtcttcatagcataacacgaaaagcatttatcttagagtatggtgtgctggggggctttcactggtcatgggaaaaatgtaccttagcttctggagagtagcaagtctgcccacagatattttcagggtgttgacacttgactgccttgcagagctcattcctgtgtctctctgttaacttgtgggtgtcagggcatggatgccatgttttccgtaaaaggtcatatccgagaatgataccgttcggatttcctggtgtcatccaatctatttgaagggatctgcaacagataaaagtatacatatacatgtaaatacaaatagatatatgtatgtacgtgtgtgtgtgtgtgtgtgtgtgtgtgtgtgtgtgtgtgtgtgtgtgtaagagagatctgcttcataattgcatctatatggggccactccaggatagaatcaataccattgaaaagacaacatttaacacaactgctatcaaccttatttactcaatcttccagacttgtcagaagggtcttatttaagcactatattctgctcatggagtgtgcactaacacacttaatatatgctggtacatatgctaatatacatgtatgctcatatcatgtactaacatacttaatatatgctgatgcctatgctaacatacatgtatgctcatatccatgactaccattcagtttgttttaagattcaatacaaactcttttagtttggggagaacaatacatggcaggtgtctagtggtctcgcacttgaagtttcagaggtagaagaaatcatcctgtgaggagtcaagagaacccacaagctattggatttgctgaagagaagcacaagtaggaagccttagtaaacagcaaccactggagtatggcaaatactctcttttatcgggtcctttacaaaaccaaagagagaggacatgtcatctggctggtcatagatatacctggaagacacctgtgaaatctatgggcagtgttcattttttagacaatagctcccttctttgctataggatgtcttcagtaatgcctgcatttttctgggaaagccagtgagaatcacagagcatagcacagaatctggcagctctgagacaatggtgtcacctctctgtctggatctgactgtgtaaatctctatgttggttcttaaacccacagacaaaatcaattcccaaattaagagaatcttcactatcagcaacttcttctagtctctgacatttcttcaaatttgaatcactggtaagtagatttgtttcttcagtaagtctttagctcatacatggtttgtggtcagaagtctaggaattggacattcccgtgatgaatacccatacagagaacatctggctttttaaaagttgaggaaccacttcatttcagatgcagatatgcttttgtgggctggtaaataaaaagagtgtgaatggttgatcaaaatttcctgccttagtgataggttaatattacgtttgtggtgaatgagaccagaaatgaaagcagagtgtcctggtggctcacatctgtaatcccagcacctgggaagttgaggtggggagacagacaagagttaaggtcagtctaggttgtctcaaaccataaacgaacagaaaaagatcaataatcagattaacattatagaatctgcctggattctatgtacaagatgtctctatgggttctcaataagcagaaagtagttaaaagtttgaaactaggctctagagagttcacatatctttgagggatagcatggcctggtatgcctcctctcagaaacatgaaatgaccagtctatttgtgatcagtgtttttgaaaaccaagtaaaattctaattagtacaaacactaattcccattttgctattctcaagtctctggctggatgttaagcccatcccaaaaaacaactacagggtgctttttcagatggagaatgttctagtagcacatgaatcaaagcaaggcatgaacctgggctcctgtttcaagccattgctttgattgtgtttgtgttgggagatgtgtatcatggcatatgtaaggaggtcagaaacaacttttctcctaccatgtggggatcctggtcttgaggcttggtagcatgtatctttacccactaaaccatttcactggcccaacattaagtcttacccatcaaagtttcacaataacttacactggaacattatttttctgtcactgtgtaagaatacttaaaattattttttcattttggatctaatcagcattctcagtgacatcactttcagaaatccaattaagcacaaacacttatctgaacaggcagcagtcaagataaaccttgatgttctataatagactgttgaaattatcatttcattttctagagagtatacacacagcatatcctgcaatgaggctgcagagaggacactaatgtccccattgcagggattcgtaggctaaaacagccattgctgtttctccagatatccaactttcaaatcaactctaccttctgtagatggcacatccgaattcactgcagaaatgaattctagaaatcactatgttctctctgtctctctgtctctctctgtctctctctctctctctctctctctctctctctctctctctctgtgtgtgtgtgtgtgtgtgtgtgtgtgtgtgtgtgtgtgcaaatgcatatgtagagaccagaggccaacctcaggtgtcatctcctcaggagctgcttgccttcatttcaagacacagtatgtcactgcacctgaggctcactgactaggctaggctggttatccagtaagccccatggctaccatgcctggctctttatgtcggtaactcgagtcctcatacttatgcaataagtctttaccagctgagatatctcctagccctagaatactactttaagtgacagtcaaggctctgacaggtgagggaatggcattcacagtatctttaatagtctctgataaaagccaccatgggcacacacatgcaagaacaaaaatcacaggggccagacactccagtcagacatttctttttaattgtgccatttgatcattatcattctatttttgctatactgcataatgatacatcgatccttataaaagcagtcacttctgataaacatgggagccagaaggcagtagggatacaatattttctctttacacaggtaaaggctgaaacaccataagtcacgatgccgtatgaggagtgaggtttcacagtggcactttattactgtattttaatgttttatccccatttgtcaaataccttatttgagtcacaaggagaaaaacctttatgcttccaagacctcagactaaactattacaggttagacagctttggatttctgattcttctaataagatatgtctctaaagaatgtggatattgttttgttactcaataatgcagcattcatactcctcaacaatattctagattatattatcaaaaatgatgagaatactttagatataaaactaaacacgtgcattttgatgaagtaatgttaacttttgatttttgagtattttgattgattttaatcttcaataatattgaagatttaactatcctattgggatgtttattaaaaactgtatcaagtaaaagaagaaaaagacaaataaaaacatacacacatactatgtgaattgtgaaataataaagccaagtgttttaattttaattttttttcaagacagggtttctctatgtagccctggctttcctggaactctgtagaccaggctggccttggactcacagagatctgcacatctctgcttccagagtgatgggattaaaggtgtgtgccatcacagtccgacaagtgttttcatttttgaaacatataaaccaaggtcacttgaaggcattgtgggagacacagatgtgaacatgaatagaaggttaagatagcggagggaattctgggaagagcctgcacagatgaaagaaaaaggacagtagaaagtactcagcctgtagactctaaagagtgagaccacatccaccaaccaccagacacacttttttattttttaggtgtaaattaactttcttttttaaaatttttaaattttaattagaaagaagattattttatatgtcaatcccaggtccctctccctcctctcctcccctgcccctcaactaacaccctacctatcccataccctttttgctcctgggggatgaggtcttccataaggggggggtcttcaaagtctgtcatattctttgggatagggcctaggccaacccccttgtgtctaggctcagggagtatccctccatgtgggatgggctcccaaagtccattcctcagctaggaataagtactgatccactacaaggggtccgaggtctcctcactgacacccacattcatggggtctggatcagtcccatgctggtttgtttcccagctatcagtgagaccaagagctctcccttgttcaggtcagctgtttctgtgggtttcaccagcctgcacacacacattttaatgtaaagagacttatggagtcctcccagcaccgtgtcgggcagtttaagagcaaacagggcgattgtccagtgttgttacttctaaaaacaagtagccagtccctttagagtcgataactggtttgaagagagtggatgagaccaggaatggcaaagaacatgaaagggcatcagcggtgtgacgcagggtgaagtttatgtctcttcatttaggaatttcagttattgctcccgaggtgtcaccaccacatgaagagtctatctgtttgagagttacttcaagggcaacataaggctctgaaaagttctgagggcaccaccagtccatcatcccaaccaacccaaatgaacagaagctggggagtttttcaaagtccaaaagttaacgaatacttaccaaatacctgatgcaaaagcagacctcatctgtcttcatcattgaaggagacaggtgatgtccctttgatcattaaacttacattttgctggagggaaatgaacagtaaacaacatatgaatgactgacacctaaagtcatggtctgagggggactggctccccagaaacacaaaaggaggatgaaatagtgagagagtcaatgcatgatccagcttcaagttatccttgtgcttggcttgtggaaaggaggaaaaagaagccagtagccctggagtgcactgagaaagagacagaatgttagaaaataaaccacactggctgctgggatggagcttgccaactgtgtgggatttcataggctagaaaaataaatttggatttagttttgagtgtgttggataaccactagagatttctgagccaagataggaaagggaaggtttttttttttttttttttttttttttttttttttttttttttacctagtattcctactccttaccctcccatacattccctaggttctggaaacgggccccgtgtacatcacacagagaaagtgaaagcagagaaattggcagtcactgcttctcatggtttgtgtctgaaggatggaaatatctatgcctgattggctatctctggagtgaagtgtggctaggaggtcctgggactgtctgatggaggactggaggacgctggcttggcaattatcatggaaatgatacttgcctttcagttagagcatgctgctggccagagaaggagcacagtggctttgcactgatgatgaagagaggcaataccatgttaactttatcacgatagagacaggcaagatccatgagccaagtgattgagtggtaagacgaaggctaggctatactgaaggaacttaacccagggaggcaggcttgtgggacgtgtgagattctttgagttttctcgggatgtttcaccattgggtgccacaaccatctgcagcagagatgtcacacatagggattgtggttatgtgaagatgctcttggggacttttcaagggaaacatacttgtctaggagagcttcatctgacatccagaagtccatgctggccaatgatgacagctagtgagtgacacagggaggaacatactggataaagagcaatgggtgctaaagaccaaagaggaggggaaatgcaagcttgatcaggtaagtatggcatgaatcttgtaatagttcatcatgaatattgattaccaaaatgagactcattaattagaaataattcaaaagtcataagctgatcgtttctgaagctgtaggggagggcacagaaagtgtctcttctctaaatctacctgaatttaggcagcttacaaactgggtccataaatgaaatagtgaaagtaggataaggatgatggcagcagacacagggaagaacatgtataaaaactggctcagaagcaagtcaactgaacttggcagttaatgaacttggtattaaaaatagtcaaattgggtcggcattgtgaagaatctcccaccaacctgaacttggtttctggaactcacatgctagaagagaggacggactctggcaagttgtgctctgacctccacatgtgtgctgtggcaggtgcacactcagcctccaccacacaaaacaactgaaaacataatttcaactggagtttagagttacctacaatgggaggtgcttctggacacataggctaacaaaagcccactgccaaatacacgttacctctttttacattgttggtcactggggtctcagagacccccctctgcaattgtaggctagtgccattgctcttgattatactatagaacttggtggtaagatcttattgatgaacacaccacatacttgagtcataggaaatggagaaaccaagctggcattgacctgaagtttcattcttcctggccaactttcatattgctggaaggttctatgcatgctaccatgggagaaaagtcatcaacagtcttgcccaactgtgaactctgcatgctacgatgatgattggcttggtaagatttatccattgatgcaattgtggcatcagtgttacaggagtaactaaccaatcactttctggttacatgtaaagtccattgcacaagcatgaactactacttggttaaaaactgatgactggctaggtcagaggatttgggaggaagatcattctgctaaatagacatactagcaaactgtcttctaagttcttatgtttattgctcagtgcatctctcaatcctcgtcaaaaagcttcttttcacagtagatgttaactaacacagagatccatgtgtggttaacataaagagaataagtagactggcgtactcaggtctaaatgagacatctatctagtcacaatctctttccctcaaggttcagagatcagccctgaggagaggaggtaggaaggttgtaggatccgaggtagttaatgaatgtccttatctgaaataatatttactggatctgaaaaggccatggcacttgttaactcatagtggctgtgagtatacacacggccccctgaaattcaaggtaggattgtcaaagggaggtgctcatgaggtcctcttcccaactgagaagctgttggctgctgatggatgctggggaggggaaaagggcgctttcttcagggaagcagccctgaaaggccaccaatgcgccattagctgcccaagaacatacaaatatgctaggctgactcatcagcaggttttaaaaaaaagagagagcagccataagtttggaagaagaagtgatagtggaagggacagagaggacagggaacacctggaggagagggaactgtgtggtgaaatggataaaaaccccacatacgtgcatgcatgaaactcaataaaaactaaatagatgaaaatggtcaaatatatgaacttttctaggtgggatggtggtgcctttgcaggaaaagatgaccagagtggaaagaattaacttttggtttcaggatacagaagtgccaagagacatgacaagagaaaatccagaggcaactggatgtatgggcatagttgagggacacaactgggtcaggggccactgaggcgtcatgactggaatactgagaaagtttacgctttctgagtagggagtgcatcgtcctgttggtagcacccagagttaatgagtgtgaccgaaaaggaacccaagaaaagggtttgggagagttaggatcagggagaatctacaggccaaggtgaaagaggagaaagggctggaggtacaaaggccacttctggacacatcaggccccttcagtgactgagctgcttctccgcaggctaccggaggtggagaagtcagtgagaatttggcaaggagaagggccatagacatgtattggtgacagagcttctggagtaagttttgaaagccactgtggtcattagacaccgagctctgtaccacagtgttgagcctacagcagatcttctgtgtgaaaagccttcccatacttttttaagattccaaaataaatcccaggccaaattgaaagtaatttccaactgttcatgttagcaagtccaggaatttagagcagtggttctcaacctatgggttgtgacccctttggcaaacctctatctccaaaaatatttacattatcattcataacagtagcaaagctagttatgaagtagcaaggattatggttgggggtcaccacagcatgaggaactgtattaaggggccacagcgttaggaaagttgagaatctctcattaagaggatgttttatgcaaagataatttaataggttggatcttacagcctgatagtttccttattaaaataaataaaaccatgatatatagatcacatatatgattataaaatcataaattactaccttcagttcaggtctgagtcactgaaaaaatcagagagagaagatctctgatagaggagagactgatgtctaatgacacaatattaaaacttaggagctccttggttcctcctcatacataaggtaaaggaaggaaaatttgttaactggaggctctgacctctgacaccagactcagctctgagttaagtaatttgaaaatccactgggatttttgcactatgctcatggtttaactgtcctttggaagaatccaacctatcatgcttctatcctaatgatttctgaaatgttgctttataaaaatattatgggcaccattccatctctccaggcaaacttgaaaacaattattttgtaagcattccaaggtctttatatctcagaagctgcatcagtaattcagcctcaaaccaatgtggtctcaattaaagtcaataaaagactagatcagggctctctcttaactttccctggagctccatgcctggaaaccatgggcttcagaatactggcgggggcaggataaaacctcttccttatatttctttctcagctttttgttttacagagacatcctaagcacacgtctgagcagcctagtacccagtgaagctgtcaggtggagtgtttgtcatatttcaatcaaagcaggagccagcctgttctccctgcccagcactgtccccacagtctcaaggaccagaattaatgaattagctattgattaaattccactctagcaaatccaccaaggcaaataaatgaactacccagggcacgtgtaggccatggccagacatgtctagggtatcgatcagtagttagtattctttggggacacagaagcagctgatgttaagatgacaagtagggaatgtgcaagatggaaacagcttgtttctaaaggggtgtatccagaagctacaggggtccatatgacctttctgcatgcctgtgcacacattgtgggggtacatgacaagagcttgcactgcagatgatgtagtcaaaacctaggcataagttaaggtcaaagacaaggatgagttgacacactccaggcaactaatcaaacaggctcatgtgatagctacatgttatcagaacataacaaacttaaattttgctgacattgcatttatcaaagaataaacataaaaatcattgaaaatatatgctttataagatgccaagttatttgcaatgttctagaagtcaagtcaatctactgatatttttctggggggatttcacatttgatttttacatattgctaacataaaagagattaaaaaacccagaaacacaattaacaaatatttactgtcagaagcgtaatgaagttacatagaaaatgctatacacagaggaggttaactgctttggtgctggtatgcttagactgaggacttggcagcctgtgcccactccttgcagccttgcctttgggaactggtacattgttacaatggctcattttaagaaaggaaatattttatatgccaatatttggttgagaatagtgcctatcatttttgttagatctttggctgaaaggggagagaaacaaattagccaaaggcattgcaataatgaaaatatggtgtgaggccatcctgtgctgaccagcatggagtaaggatgctacagccattctctcccagacagcatagtggaaaagcctgcacacacagcactatctgaggactctggaacgtaaccatggtagtggcatcatgaaaggcattaagtcatgaagaatgggtgccagaggatagactccccattgtccttcccttccacatttaacccagaggtagtcccaggatagaacagagaactgtgaaagtgaagtccgagagactggcagtatttttctatctttttggtcagagtgcgcagaggaggaaaaatatgctcaggacaaagagtgtggggcaaattcccattatgttttgatcctgtatgtttcttcttggccttgcccaaaggatgaagcttgtcagagggaagtatcatggtttcccaggaatgtcccttcatacatataaagaagcaatagctacacccacagttacatgtacagacatcaagtctccttggccaataattgacagagcaactcagtgggtcaataagtttatagatatccaaacattgccataactcaaccttctccacctgacacttataaacacattgaccaaagctgcacagtcacgttctttaagtgcagtcaatgtatatttaataactaagatagaccatatatttaataactaagatagaccatcaataaaaccttagctaatgcaagagaatggaaaaatcacaaaccaatgtccctagaacatatgagaactaaactaaaaaaaaaaatctgtaagagtatctgaaaaattctaaatatttgtgaaactcctcgtgaacaacctataggtcaagaaggcccaatggtcagtcaataaaagtgttttgagcaaatgagaatgcaacatctcacacaatgtgtgccacctaaattagggctcagaggtaaacttaaagcaactggctccccacttcatctcataccaaccaaggaaactgctcccttctaaggaaacaagaaggtaagaaggaggaaagcagtaaggagcaagatcatttggagtagcaaacagaaagtagcatttaagaaatcaatacaggttctttcccactgtgtaggctgcctctgcacttggacgatggtgcctttggtggacaggtgggctgtaggttctgtgagatcccatttatcagttgttgctctaaatgtctgattttaggactcctgttccgaaagccctctcatttttcagtgaagtgtttccccttctttctccctctattaaattcaggatatcaggtcttaggctgaggttcttggtccatttggagttgagtttagtgcagggtgagacagaagactccgctttcctcttccatatgcagctctctccagtttggccagcgccctctgctgaagacaccgtcttttctccatagtgtgcatttggcctcttcctcaaaaatcaggttcatgtacttatatgtggatcctcagtcctattactatgatcaggtgtctgtttttaagccaaataccacacctttcttctttttcattactgtagctctgtagtacagcttaaaatcttggatgccaatatcttcagcaggtgtttttcatttgaattcattcaggattgtttgggctatccttgttttttgtttctccaaaaagaaactcaaggtcatcctttttaatttctctatggataattgtgttgggattttgacaggaattgtgttgaatctgcaagtttgcttctcgtaggatggctttttccccccacaccctcaatcctacggagataccatataatgcagcaggagatagtggtcagcatagacaccacaattgatcaaactgcagataagataccatcgagcactaagttctgaatgacatctatatctctcctccctgccccttcccgaagctgttgtggaagagggggtgggaagacctaagagccagatgactgcagtggataactgcctaaatgaatcagtgttctccagacatgacagggtggttatacatttgaactcacagtgtttgtgccagcatgcattagacctgatcaagcgcaagtcagaaaacctctcagcgtgaagggccacttctagtgaggaactcttaggagaaggaagagtcagttttattaaagggtgtggcctcccgtaggccaaccatattctagtggagagctacactacttaacacattggcatggcacagcttggaaacaaagttgggtggacaggaaagcagggtgaatctgggaagagtttgggaagggggttgaatatgatcaaaatatgttgtatgaaattctcgaagaaccaatacaaaccagaaagacatcaataaaactgagaggtgtttttttaaaaaaaatctactaaaataaaaactgccaagactctacaatggaaggaaataaatcaatgcgtatactggaagcagcaatctgctcatcaaactgacaaatgtttgagattgaccaactctttggtcaatcttcaaggctaagataaaaaagctcagttggaaagaaacatccagaataccccaaattattaagaaaattgcattccaagttaaaggtttttcttcaaggtaaactctagacaaaagtgggtttcattggtgaattccaacagtgtttaagaaatacataaaataatgttttataagatttctccacaaagtagagagagaagtagctcccaaccctttctgtgggggacagaatgagcatgacagccaaacaaggtaaaggcactgctagaagaaaaggtacaactgaacccaattctaggagcacagctggaaacatccacagattgcagcgagtagctcccagccacatgtaaagaggggaccacatggcaaccttccagggcttcctcacagaacacagactggcccatggcttttgaaatcaatacataattaatcacccaaaaatgcaaaacacagggaactatgtgacataatactatacatatttataaaaaataactctcaggaaatgcaaaataaaagataattcttcagcccaatcaaagttttcctctctaaacttcacaggtgacaaacatcctcgctaatggtaaaggaacggacgtgtccttacattcattttttgtagatccattgtagaattcagcaatctacaacaaagtgcccaagactcacaataagtttagcaaggttactgaacagagttttattatatcaaaatcaatggtctttctacatgccaataagaaacaattaaattttaacttacttaaagaaacattaataattgcatttctaaaagaaaacaattaggtacaaatctaatgaaataccttcactactgtgtattgagctctgtcaaatgttgatgaggtaaattgtgcctaatacttgaaagattagatacaattgagacacaaattctctcccaattgactcacagagtcaatgcagtcctaattaaaaccacagagagatttttgtagatattaatagactgtttccaaaatctacgtggaaaagtcgagtaaaagaaaagccgaaacaagtattaaagagctccaacagaagggtcaggctgtatgctttcagaggccactatgcatttgtaacgctcagcattttatgatgctgatgacctgacagacatattgacaaattcaacagaaaattaaacagtgtcctataaaatgtgtttatgttcatttttcacagcatttgaaagttttcagtagaaagaaaatagtcattgtaataaattgtgttggaactacaaaacactttttagaaaacaacaagaaataaaaataactctaacttgtcccacacatcagtctaattagcacagatgtaaattcaaaattcaaaatatcaacgtttgtctaaaccttgtaggagaagaatgataggaggaatataatatttattttaggagttttttttttttttttttttttttttttttgctttcccaccttcaaccaagatctcagacagcctaagatggccttgaattcactctgaagcagagaaacatctcctaagttaaggtaaggtagagttcttgtgttaaacactgcatgtgcaagccaaacaagaaataaaaggtaaaaccaactctgctgaaacttaagtcttttgttctataaaagacacagttaagtgagctgagaagataagctacctggcgtggcatggtgactcacacctacagtcacagcacttgggagcctgagacaggagcattgggagttcaaggtctttgtaggtgaggtggtttgaataggaatggactcctaagacttatatatttgaatgcttggttattagggagtggcatacttgagagggattaggaggtgtgccttaatggagtgggtgtggccttggtggaggaggtgtgttactgggggtagctttgggatttcaaatgctcaagccaatcccggtgtctctctcttcctctcttcctgctgcctgctgatcagatgaagaactcccatctccttctccatcagcatgtctaaccacctgctgccacgctgataatggactaaacctctgaaacagtaagccagccccagttaatgttttcctttaagaaaattgttatgggtatggtgtctcttcacagcaatacaacactaagacactgtgttacacagcaactttgaggctagtcagtcctacaagacttcatgacagaagtttcagaacagaacagaacagaacaaaaaccccatacttttaagacaagccatagactagaaaaagacatttgcaagttattagacataaataattcccccaaaatgcataatggtaatgcggagtagaagatgctatgggcaactttgtcaatcctttggcaatatctcatgactcaacagtctagtggattgattctgtacaccagtgactatggtttcaagatcgagtatttcttctctttaatgtgatgctggttattcacgattttatcttttttggggcatagctcacctagtttcttttctttttgcatctttgtcttattgcattttcagagccattgtctcaaactctctcccccaatgtttcaactcagttcacacttctaacatctacaaagttccttcttctcacattagttaccctttttatttttcttatatcctggttttgcttccttgatagaagatctcctttaggtaaaagtttttctgcacataaacagtttctgagtctatcaaatacttttgtttatctttgtgcttttgtcaacttgaagagtagcacacccacccacataaagctcactttaagtttatagatgacagatcagcatactctcccattggacatctgacatgcaaacttttatttaattcttttggaagatcccatattctattatatggaagtattttatgtgattcattgttttccagacaaaaattagcagtttcttataagggggcatttctgattgactgcttgagttagagaataagtagagcaagtagccaaaggtttgtgttcaggttgcagtctcaatcattgatttttacctttatctagcatctctgctactctgcctagagtccataattcttagtatacaccatgaagcttccctagagaaaaaattattaatctcttggtagttggagtggaccacatgggagaggagaaataagtggatacatagacagtgggagggggcctaggatactcatcattatcttttgtagattttcagcaaagttcattgttgaccttcacttcacacatttctccatggtgtctcatgcctctctattcaaagattctctgcagaaaattaagcttgcctgatatcaccctttcagtcttccaaccaatataactttatcaaccattataaataatttgtttcttccagataagttctgcttccaaaaatgtgctcaaatctggcttgcactggtgtctcctcactctgtttcttactatggtacactgctcatttgaatggtctcatattaacttcttacatttgggactatgcaatctttagttccaaccatttccccctctggtatgatctgtagtaaattcataaaagaaaatctatgatggagacccaggtatatttcttcaatttttcataaatcttagagactacttttggctgaatgtaaatgtatgatctaaagtactattctttagtcattcagcagatttataaagatgccagaaggtaagaacagggcaaaacccatctcttgaactatagatattttctgactttaagaataaactcagtgtcttcctctctctccaccccaccgaagattctttccatcccttataatcctggctagattgtggaatttcttctctgcatattttcttgcacattgtcaatattgacattattttcacataatttataaatatatagtaaatatttaatttcccacccccattctaggacagaactttaaatctaaacttgtatatactctttggaatttatttcacttcctattttattataaccacaaataggtttgattaaaatataaagtctctagtgctcaaataacatgtgcattcctccttttcatagtaagctcctattcctggcatacatggcaaaaacctactgaaagaattgtgttaattagaacataccaagttagacaggaatgtatagtttgttaatatgaaaacacactcaagaagataaaattttcaacatgagtagctaacattcagttgcttgtgtttgccaattgttataattactataggctacagttaattgtattgctagcatttctattgctgtgaagagacaccatgaccacagcaactctcataaaggaaaacatttaattagggctgttcaaatcaaggtgtgaagcaaggcagcatgcacagagacatggtgctggagagatagcttgcaggcaataggaagtgaactgtatcccacagtgggcaaaacttgagcacatgagacctcaaagactgccctcacaatgacaaacttcctccaacaaggccacacctactccaacaagaccacacctcttaacagtgccattccctataggccacacattcaaacccatgagggtataggggaagagggatacctattcaaaccaccacatcaatatacctatttttgttctgatggcaaagcaaaaaaaccccaagccctaggaatatcagtgtgttctggctgaaactatcagaatggaaacacaccatgatggatgcagtcactctgtgtgtgtctgtgcacatgtatttaggtaaaaggtgattcaccttgttacgatcaaagtttgacaagggacagttcacatttcctcctttagtctcacccaatatagagggatcagcaattgtaaccttactttttacttatttctgggaaatgacactgagttttgttcctgttaacagtggattattcgtatttatgagtgttatccctgtgcagagcccatgttaatagtctctctatcattacaattttaatatatgtgctactaaagcaggcacttactgtaattgttagtttatttgttgagagaacccttgctctgttgaaacttgctttgtagaccaggctggccttgaattcatagagccaggtctccagtcccaaatctgaattactaacagaggactcactttcaatctgtggtaatctctcagcaaggaaagagtaaagaaagggattctattaagaatctgataaaactgttagcagctatccaaatactatttgctctatatatttgagacacatttttagctctagagcaatctgagatagataaatcaaatattttcaaagcgattcagttataaaatggtcattctaattaaaatttgaattttgcttcacaaaagaattcattaaaggacacatttaaataaagaggctctctttacagatacattcaagtagctgttaatagatgaccaggcaagagatatggaatcaggaaaataggttttaatgtttttggtatgcagtgtagattacctgagaaatataaaaaatttgatatgcacccatacttacagcaacctttaagtgagagtttcctggctaaactgatttctttgatatttacttccatttcttatgatccaagttgtttagattgactgataaagagctaggtaccttgaagtaatatcatggattataggtattgaaatgtcagttggagtatcttccgcagtgctgacttgggttgcattgcttttcacgcaggcatcttttgtacagacttccacctgcaaagattagtttggaaaggaataaatataatcatcttcaaaacagaccagcaacagtctgaatccacctcccccctattcatatgattctcttcaagtccatagggcccccccggggcttagtaaatattcttctttttgatgtgaattgaatccagtggggtgagctcagaacagaatacagaactgggctcgggacgattgatttagtgattagtatggtgatgtttggtctctggttctgaccattcacaaagagaagggcttattaatctactcagaacagtcaaaggacgggagacgctcaggtgctgattcacaagcctaataggttatccttgcacagtgctctccagatctatagccatgcggtataatgatgatatctcctggaagtcttgacactttgcaacaaattgcctaaatgctaatgtctaatgggagaaaaatgaagctcagggaagcctcccaatagggctgagctattttatatccatttgttccagctgcaatagtattgtccccttaatcacagcagaaaaatcatcactcacccctttaattctgccacctagttagaatagaaaccgagagggtggcagaacttaagattggaaatggggcccatcaaacatcagtacccaaaaggagtgctacccagtggccggcgggagagcatgcggaaacacaggagaaatctggtgggacagctgccgccacacatagcatttaaagggtaaactcaactgtgtttctttttataaaagatttattctaaaaaaaaatatatgtgcatgtctctacatatgtatgtttcgtgtgctttcaggtagcaatgggggctagaagggggtgccagatcccttgggactgaggttatgctggttgtgagccacctgatgtgggatcggggaatgaaatctggctcctctgcaatagcagcgagttctcttaactgccgagccatctctccagcccccgaaccatactttttcttgtgttcacttcagtgccatatacagaggtaaaagagtgctatgtaccaatgatcttaaattctgctgctgtgggtttaaggaaatcaaccctccaagtctttatgtcagaactggagcgagatagaaaagattcatactgtatttcagagacaccattttgttgtcagccctgtcatctctaaacaggaacggggtacatgtttgtggcagtgcaccagctgtgttttcaacagttgtaatattttgtggtactattttatagacttaatcattattaagctcctccactatggctaagcacaaacaagaaataactttaagatagattatcttaaaacacaatgtggtagagttaatgctataagttttatgcatgtcggaaggtaccacacattggtacgcaattttattaacccaagtactcagccaaactcattatgtctttagtataaagatatatgtctgatgggctcttgaccaaataattgttaatgtcttctggatgtacaataatagttcaggtttgtagagtgagatatgcactctacatatgcttatattttatgtgtttacagcatgcaatgaacaatcagtgtagggaatggtgctgtctcctcgctttttcatgcttggagcttgagttcctcccttctagctattgataaagtagactatagtggaattagccctccactctgtttaacaacatcagaactcactgctcctaactgagctttggtatctgttaactcaggctttctctactcccaactgtcatcacttctgacctctagtaaaaaccattctgcatttggatccagtactctttatcttgcacatatgaggaatcttcagacctacactttagcaaatctgtaaactcggaggcagagaaatcaggagactccaaaggtggtcagatgtctgatatttgtctcgggctttactacatcctacttctttctcagataaatattacacttaatttgaaggactaaagtactcatgcttctgcaaaaatactttctgttgactttggagagtataaccctgtgttctcattctaatagaactaatagaacactaggagtctctaccctggggagatctctagtaacatatgttatataacatgtgaatgaaaagtaaattttaggatttaccatatttacttgaaaagctcttaaaaatcaagttttaaaattgaacttatgattctctttgaacaggggacagaaggatttatccattgagatacctgggtatttgatcagttttaaaatcaatcactattttgtggaagaggttaacctagagaagtttggttcaaaatattgggtatacttgttcaatgatgacttaaatgatgtttgacttcataaaaaaaggcaccaaaatttaacattcaaatttccagccatgcataaatatgccaaatgtgataataccagactgaaaaaaaaaataaacagtatgtagatagtaaggaaaacccctcaattttggggttcaattttgaccttctgtctttgtttcaatgatacgatctgattaaaatatgctttcttttggccacaactgactcaatccctcagagtgagtgaggacttctgtattactaaaggggaaagtgatttggtatggcaggccttgttctacaggccaaggccaagcagcacatgtacacacagcctcagagtcctcaccacctgtctgcactctcgcttccaacttggtacctaaatatgtatatatgagtgcatgtatttaattacttatttggggtgtgtgtgtgtgtgtgcatgcatgagtgcatacatgagtgcatgtgtgtgtgtgcatatatgagtgtagatgccagaagagggtattaagatctcttggatttggagtcgaagacattttcaagacacgtggaccattatgtgggtgccagaatccaacaatagtcctcatgatagcccggcaggcaccctcaataccctccaccactgaaccacctggccagctccagaattcagattttataaggtaaatgatcaggcttcattctcagagctcaggcgtatcctccaacagacacccaaagaagacctcacagcaaagcctccatcaccacccagtgttctttgttcacacagctctaattggaatgagttggggcatggttttatgaagtgacccatatgtggactctccctaaggtgtgtgaatgcaaacacagcagcccacatgtgccaacgcctatgtaactcacataggttgttggaaatgaaaacacaacccatgaaactttctttctgtgcctattgcttcctttcttgatgtctattgttctattgtagccaaataaatgtgcttccctctcagacatgcaaaaacagcatgtaacatgggcaagacacaacacccctggcaaaatgcttctggggtcaaataaaattcctgcatttaataccttttggaaagtattcatgaagtgctcatgaatttgaaaagttgagtagattatttaaaactttactaaattgcagccttttctacaagcgctgagcctctaaaaatcttttcttcacatgttcgctcccttggccctgttatctcatgtttatctgacattcacgtgaagactttcagttcctccaggacaacactgtatcttatagacttctgggctctggtatgtctcctattttagagtcagtagaccttcaagaggcccacaggcttggcttcgggtagacaatgcactctctgaattctgtgatgtttgctgtgttagtgtataaatattctcctaaggaaggaggcgtgcacttagaagattctcctagactcccaaggacaaaacctttaaatgcagccacttcacatgggttaggctgtggactgtttgccacataatgaaaagattcattccttccatgcttgggtaaaatcctttggcattttgttttttatttgcctcatcttatgttttcctgttgcattcaaaatcaggaatgacagtggaggacagaatattttgcgttatctatgtcatgcctttacaaagggacaactgacacccagagagctatactactttcctgagtaagaggcacaaaaaagaacagagagaaaaatctctacaaggtaattctgatgttgataggaataaaaaaggaggagaaagaagacaaagcaggaagactgtcttttttggtgatagtttgattaacttcatttcaccagtgggtattttatcatctccctcatcagcaccgagctccatctgagtcaaaaaacaaacaaacaaacaaacaaacaaacaaacaaaaaaacctgttctttttccaggggctcaagtctgcaaatccctcacagcaagcagctttcattctggtcaatttccctcttctctctttcttttcccttcaaataaacaataatctgtaaccaggacagacagcctccacatggagatgttggccggcatgttttatttaacatatccatgagcttaaccatccaaaaaagaaagaaaacaattctctgacctgaatgtcatagatagtgaagggagacaggcctttcaggataaacgaccccggcacactcactccagtcttgtagagctgattatttacatagacagaagactcggtgacaatggcatttggatttgaaggagatgtccagatgacacgtacagctgtactgttgatgacgacaacctctggaggaagcatgccccgaggctctagaattaaaggaagaaaccgaataggccccagctgtctccacaaaagcacttgttaaagtaaatgcagactgatacagaggctcagcaaagggctccttgcttttccagtttcctatgatgaagacagcacagtctgaaatcctctacaaattggcttattacactctcagttagaaaccataagattcggtggcgaaatgcttcataccaccagcgacgtgctaatcttcaatgctatgtggccagtgggatacaaatgataaattactcacccgtctgcacctctaaacatggatctattactttcaacctttctctttatacctccttgggggtgggggaggggagtctgctccttaagccaaatataaaattcaaatacactgaggctactgggatgtgaaaaatcatttgctgttactcgcttgtaactcaagcgatgtgaagcaataatgcaatattgtcattatgtaaatgattttgagtgttgattaccataggtaatgatgaaatctaacatcggggaaaaaaatcttgcttagcattaaattacacaattattcaagcatgtcagaaataactatgcaaaggcctatttttatcataaaaacccatcttaactagttgaaaaatcgtccttgtgagtcatcctgttttataaacaaaaggtgctgacctttggcatcacaaaggaaatgggttccatacgtaaagagttctgctaatggcctgaaacgcttgcttgggaggtaacgatattataatgtttataatgagcacatataaagccagaaagattagaaagaccattccagactcatttctgactcacaagttgattctctggcttcctctcccttgctaactggccctgaaactgagacattggcaattcttctccgaggctgaacttccacctagtgttttctggttactcggggagggtgcttcttcagctggggtgtcattttgaaaagcacaatgctattgagggataatcttagaaaaaaaatgcctctgaaatttatcttttactgatgtgaactgactcccaactaaggctgccctgaaaagaacaagtggaaactggtctaatggtcagttgttagggctccacaccactgttcccaggacactggtctaatggtcagttgttagggctccacaccactgttcccagggcactggtctaatggtcagttgttagggctccacaccactgttcccagggcactggtttattcctctgtcacttgatgacaacaagcatggaagcattatggtttctaacacacttcctttcagctctggggattttataaatgagagatgatggaactcagctccaaagggaccaatcaatgccactggcatctctgtagtccagaacctctcagaatctttactcaccttcaccacacgtggtcacgcccaacactgtgctgttgatgctatggattccattgaaggctgagaggagaatctgatactccatgtttggagctaaggcgccaaggacatgacagtctacatctgggaagattttcaaggctttgttcaaggccccagaattccaaaacagtgtgtaatactccacatcgccttgtagatcttgaaatgctgttaacagaaaacatggaagattgtaaacgtggcaggtgggaagcacagaataaatgctcttgttaaatatttctggaatgagatggaagcaagctgacggagacttcggtttataaaagtttctggaagccgggacttggtggtgcacacctttaatcccagcactcaggaggcagagtcaggtggatctctgtgagtttgaggctagcctggtctacagagtgagtgccaggacagactccaaagccagacagagaaaccctgtctcaaaaaacaacaaaaaaaagtttctggaaccttctttgtgctgaagctggcagagttggagtttattttattttaaaataaattttatttttctctttactctatgatcaattgagaagtcatattgaggaacatatactttaaaatttcccatatatatatatatatatatatatatatatatatatatttgtgtgtgtgtgtgtgtgctatttataattatccaaataaccttcgaaatgtcactataactgtttacaaaagtatgtgcaatgtaaaggaaggcataatggagggctttcatgactttttaaaaggactccctcacattcacatcttggggttcatgtataagcagcaagctttaactttgactatttcccctaaccctgacactacttttactttatctctagcagtattttaaaaagatggctgtgccactgtggttggaagggttcctgccagaagatgtcataatcaagttggaaagccttggagactggggtgtttatttttcctctgatgtaactaactgtactcatacttccccagtgacgaaaccagtcaagtccagtgaagccacatggactgtccctgagaagtctccttgtctcaatagaaacatttttttgtcttatgggaatatcactcactaacctgtggccattccatagcaaggaagacaagttagacatcaagtttgcgccatctggtaccctaactaatttaaatttaatttaaaaattaaacctttatgacattaaggaagtgcttccaaactcttatctgacaggcttctcagggagacagaaaacataccatgtactcacctagaaagggaatccacaatagaccaactctaccaaaggctgatgtggggagccagtgtgtctctcttgggccactaacaggagtgcaggcagggtcaccagtaaggagcagaagtaattcaaagcagctacatctctagaaatcctaccccatgatggatggaaccaaacctggcaacactgaagctcgtcttaacagcttgcaggcagctccaccagctcagtgtgtccttccttccccagtttggctggccagcacccccacccccagcaactgtttcccctttctgtgctgttgagagaagccccctagaaccttccagttacctagtacatgtgagcttctagtgacctgaggctggcgtgttccccatctttcccacaggaaatgtcctcctgtggaggggatgtctccattaggtagaaaatgccggtagattttacttatgttatagatgtgccttgggagcacacacacattcaaagattacgtgtatggagctggccttgcacttataaggagagcatagatactatgtcaaggtctgaagaaaacccctttacctgtccattcctagcacagttccattcaccaatccacttaacacagaacgctcctcactgccccaaggatgagagaaaaggcggtgggttagtccttttgcagaagcctccatgcatgttactccgctctcgtgactagaaatgggtggtgtaactggatagcgaggccatgtttctaccttttgccctgccttttgccaagtctgcagctgatacagtggagttccaacacagactaacagcagggacacttggtgttgctactaatccctactccacgagacagtctgtgagggctaacacatagtctgtattgtcaagccaccatggcctcttctattcggtgaaccatttgagagacagaagatctgttcttctttccaaggacagaacaaatcagagactgctgaccttgcttcttggatagtcagaaggagaacgctagtaaatctcaccttttctgtctattgataaacctggcttgaatgtaattttcctttccttaaagaggaaattttgttatatggattcttcattatgtaagacaggaggaacatcgtctagaggaccccatgcactactattttcatgagaaggagatggaggttttaaaaaacatttgaataatgttcttcaaaaataacacaaaaggacatgtctttatgaaaaggagctacgaggcatatgaaaacaggtgcctggaattgttaataggcttgagatggaagagtttagagatctactttggataagaaagggaagaaaacgcaaaaaagtcagggcagaattaaaaacctgcactgaatgaagaaaactgtcagaatatgcagatacacaacatccaagactgaagaaaacgttactttccagagtggtgacgagatgcaaacaacaacagtgatctgcctgccagacaccctggtgcaaagtggcatacatgtcaaaagaggaaccagacactttttgatcaacttaaggccaactccatgagatgggacccatatatggcacttctgaaatggccaataacatgacaggagataagtcataggcctagggaaaacctacgtctattattctgccaaaggaacatagcaataaaatgactcataatgacattctgtcatactcatgaatcgggccttgctcagtcctcatcagcaaagcttcttcttgcagtagatggcacctaatagacactcagagctggacaaagggcagggaatgagagacttggaagcactgagctttaactgggacgtctttctcaaacctctaggctcagggatctatgtggaagaggaggcagaaggactgtaagagccagaggtggtggatggctccaaggaaacagtgtcttccagatacaacagggctggtacacataggagctcacaaacactgacagcacaggttcaaaccagacaaaactctagcaaggaaaagaggaaatccatccgctaaccaagaagctctttacaactgatacctatcggcaaaggaacaagaaaatcagtttttgccagtgaagtgtcactgtgtatataaaccacactccagggcaggccccatacccaggagtagttggtcaactcaagacacactccataattgttttgtgagctttttgttctgttttggtcttctgtgtcttactgttttgtttatttgtgtgtatgcattgtttgttttgacatttgttttttattgtatgcttcacttttagagagaaagaacatgaagttgggtaggttgggaggtggcgatctgcgaggagttggaggacaaagagtatgacccagacataatttatggaaaaaattaaataataaaaataccggagacggacttaaagggagggatcatttcttttgactcagcattagaggatttgggccagagatctctaaccttattcctgtgggcctgaggtacagctgaacctcaattcgagtgtgtgtgagcaagagggctatattctcatgaaggacagcaagcagagagctgaagggtgctgagcagtgagaaacttcccacactcccagtaccaaattcctccactgaggtctgcctactaaagtctctacaacctcttaaaatagctctgccacctttggacaaagaatacaaaacaaagtctgtgcaaatatcttaacattcaaaccataacaaagataagaatgggtagaacacaatccctgaacttaattatcatcatcaccttgtagatactgaggacagagaatggaaaaacatctcccttgagaggtaatcacagtagtactaatcatggctacattagttaagccttatccacaatgaagagatttttataaacagaatatgatctgtcttacttctctattgctatgatgaaatgccatgaccaagacaacttataaaagaaagtgtttaacttggtgttcacatttctagagtgttcgagtccatgactatcacagtagaaaacatggtgtcaggcaaacaaccatgattctggagcagtagatgagaacttacattttcatccacaggatggagaaagaccaagcaagccagagtcttgcatgagcttttgaaacctcaagcccatccccagtgacacacctcccccaacaaaaccacacctccctcctaatccttccccaacagtttcatcagctggagaccaggtccttgaacatttgaacctgtgtgctcattcaagcccacattgtcttacccaaaggttgccaatatatccaaatgcagatatatcacggtatactgtgactaaagaaaactaaatgttagaggttatccacagtaggatattctcatgacttccttgttgctgagatagaacatgggatggaaatgacttcagaggtttcattctgacttgggtttggaggttgctgtccctcgtggtggagaaggcaggatgtccaatgggtactcttcattggatggtgtgtcaggaagcaggcaatggggtggggatgaagactgtgctgaaaccttcaaagagagctctccatgactaactctgcagtgaggcactgtgaccagaaagtcccacaaccttcaaaacggcaccaccaactgggaaccaagcgttcaatcccatgagcaggtggggacagtctacacccaaagcacagcagaggggtgaaaatcagacaagctcccaaaggtgcagctaaagcattagatgtttcaggagaatagaatagaatcagtttttttggagggaagacatttgatccaagaatgttgtatacatctaagtgatcatttgtgtgtgtgtgcaaaaaagggtaaatgtattcctatactggcaaaaaaaaagtgcaaacatgaaaggaatatttcttatataggcaaaaatgaacatagttacattaaaaactttcatgatgatccaatgagatgcctcagaggggaaagcattagctatgctaacatgatcccctgagttcaacccctggagccatggtggaatgagagtatcagctccctcaagttgtttccccttgaccctatctgagaactcgggcatgcatgcttgtgtgcagacacacacacacacacacacacacacacacacacacacactaatcataaaaataatagaaaaataagcaagagatgttcacaatgaaactctctgcaatcaccatgcagaggccagaaaggtaaactgaaactcagaatttaggattgggggaaattgaagtgattttgagaaaatagttctgtaactgttaatataacaatgaaaacaacctataaattgagaattacaaacattgagaattacaataagaaaagtcaggaaggaacacattaattccttattataagcaaaatagaacaacagggaaaattgtaaaaggtgtcactatgatcacacactaaattaagataataaaaataatctttaaaataggtgtagagatcattgcctttaggtgaaatctgctgacgggtagaaggtaataaaatactatttttttcaatgctttcggtatggaggaaatggagaaagaaaatataatctttgtggggaagcttatgctgtctacctccctgttccccataaaagtctggaacacagatatctctgcctcagattacaaacatacgtgatggaagcaggcaaactgttatctctgtcaacttgtgattggtaaaaatttgccaggaacatcttgctgttaaaatggtgtgcatttatgacaatcacagcagattactataatctctctgtgtgtggtgtgtgtgcacgtgtggtttcatgtgtgggagtacacacatgctttgtgtggagtcagagggcatgcatgggtgccaggggacagcctcaggtgctgacgcccaccttccgctttgagacatactctgtttaccaccgtttgccacatgagctgtgctgggggcttatggggagtctcctacccgtctctccttgtgcaataggtgtgctgggactattcctgggattgagccagcactcagcccagaatgaatggagggaaggagggaaggagagacaaagagagagagagagacagagtcagacagatagacagagtatgcacacatatatatttatttcattatttttgaaagatgatgtttaccaaacaaaggggtaaaaatttattcctaaggttttcaactccaagatgtgctaaacaacagctttgtactgttcagctttgtaggttatgcaccgatttttcttccatcaagcaagagaaaacattaagatgaaagttgtgaaaacaggcagcccttttgcagcggagtgactagctaattgacttaagatagcaggttgtacaaaggagggacaggatccggcagcaggctttcacaaccgacccttctcaaagttaacctttgtgctctcctagagttatctgaaaaatttccaaggtatgaatggaaatcccagcagattgcattacctacgtcccacgggtcagaggttctgattaccaaggtaatgagacttcagcgggctgcttcagatctattaggtttgtcagcttctataagctgacttcaggaatgggatgatatcacagagggtatacgtgatgaagaacacagcggccacatcttcacttcagtgttcacggatcacaaggtgtgagtgtggacatggggtgcggtgactactgatatgggcaagatcttaggatggattggtaggcaaggtggagcaggaggaagcagggaaagggtacacatgtacgtacacacacacacacacacacacacaccacacacgcgcacacacacacacacacacacacacacacacacacacacacacacacgcatgcacacacacgtgtgcacacacacacacacacacacacacacacaaataaattaaacttcagataaaatctgcccccccccccgatgttacaggagataatcaaaagatcaattcactcaaaatctcccattaaaatggttcaaattattctaacccaaatgcattagatcatttaaaaatagcaaacttggccaggtgctggtggcacaagcctttaatcccagcagaggcaggtggatctctgtgagttcgaggccagcctggtctctagatcgagtgccaggatagactccaaaaaagcaaacttacaaaaaccgtggagggtttttttttttttttttccttacgaattatttagtggaagcatgaaccgacacaatgtatgcccctatacacaatgttcctcaggcctacacaccctgggcttggttttcggcctctggtagcattgggaggtagtgaaaccttggagatcttatacccagtagaggttacgtggcagactggggcagctgttgggaagaatcttggagcatgacctcttatttatttatttatttttgtttcaaagatgctaggatgtgagtagcttcatccaccatgcacacctcgagcattgccttacctcaggcctcaaagctccagaaagaagcgatcacacacccaaacatggaaactgaattgatatagtcttccttccatgtacaaagatttatttggggtattttagagcaatgatggaagagtgactgatacaaacactgctctgatttgcagttgatggcatcaaactccagtcctaactcacggtggctatcacacggcagaaagtttatgcaaacccacctaggtcttcttaggccttcacaaattccagactggctgaaatcgtgctaacgactgccattgttaagtacatctttttgtaaaatagcagataactgttctagtgtgtgcttacatctataaaacaaataattttggtcaaacctgaacaaattagatatttctcagatttcagtgaaaatactgacaagttttgattctgccatttgtcagatcttgagtcctgcctgcaaaatggctagcataaacattttcatggcagactcaggacttcttttctggttgttcttaaaggcagcacatactttacgagcaaatccaatgctaaacaccataccattaggtagctctgagttttcattcaccatggttcccagagttaccaagacatctgttttgttatgctgtttcaaactcccagaagaagtgttccattgggccaaggaatgacccttaacccagtgacagtgcatacagatggaaatccttctccagccaacactggctccaaggcatgacatacagggaactcatactgttgcagacattgtatgtggttcttgttagtgaggaatgagcaaagggcaacagctctgagggctgcagaagggtcacagtcctggttggtgcccagttatcaagcagacacttctatcagactgtctgctatccaatctctacactggtgggattatttccttccccatctgaatatgggagggtcacacggatacaggaagaggcaaggaggcatttgtgccttaagaagatggtggtgttgaaagcttgagaatctggaggtccctactcagaacccacataaaacctggatatggccctgtctgcttgtaaagagtaccgggaaagcagatgaagagtcaggtttcccccgccgccccctgccgcaccctgccgcacctgcccaccccaccctcctgccccacccccacgccaccctcacccctgccccctgccctggctggccaggaaatccatgaacatccagaggaacaccacctttggttgacttctggcctccacacacacttgcctacatacatgtacgcatgaccataaacacatctgcttatgtgaacatacatgcatataaatagcttaggcaccttaacttgtttagtgtgctgtggcggcagtttgaatgagaaatgttcctcagtagtcttgggaatttgaatacttggtgccggttggtggagctgtgtggggaggtttaagagatgtggcactgctggtgaagtatgtcactgccatgctgcctgctgccaggcctcctagccaagatggactctagtcctctggcagcataaaccccaataaacactcccttctttcagttgccttggtcttggggtttcatcacagcaccagaaaagtaacacaagtgttaaaactcagaggggaaagacaggagtagaaagggttcttacttggttttgcccatctgacgtctatggctgtgtggtttaggacgcttgcagtcacagtggctcctctctctggaaagcctgctaaggtggtcactgtcacttcttggcttggtgtaaagcccacactgttgtgtacatagagcttatactcatacgttgtaaacctgaaggttttgtttaaatagagaaataaaaaagcatatgttacattctaaagaagacaaaatgcatttttttctctttcacaaaatacagggttcctttccaaagtgttcagcatccttttccttcaaggaaacacattatttcctttcttctgacacaaaacataccattatctccgtaactctccagcctcaaccagagtgtcaggaaaacattttatttggaagctgtaagcaaatgtcagtcttttaagtaaactcgggttatcgttttctccagttcttactgttttcagaagcagtgaggattatggctcaattcacgatgtaattacaaggctggcagcctgccagctttctgtctcaataccatccagggggttttatgctcttctttagggaaactcatccattttcaaatatcagattccatcatcattttcctatacctcttctctgtccctggaattgcattggctggcaaataaatgcttacacctcaactgtgagcagagtgtgcaagactgcgtctctgagagtttggtggcagtgaggtatactgggcacatgttgagtcaatacagaggaaatcgaccaacacttggccagaggagaaacatggacatatagcatgccaggaactttctgagcacatgttagattgttagttcttcatctcttccgttctctctctctctctctctctctttttttatttttggttttctgagacagggtttctctgtattgttttggaggctgtcctggaactagctctgtagaccagactggccttgaactcacagagatctgcctgcctctgcctcccaaatgctgggattaaaggcgtgcgccaccaatgctcggcgctttggttctttcaaacaggagcccagtggctttgtctttttggttcaaaattgcctgagcaggaaaatgcagtttatagacaaaatcaggcccccagttctacaataatctgtatggaatacttgctcagacatattgagttttaagtgggcgtcccaactttggcttcagatcatcttcttctaatttggggtcatgatgtgtttccaggatatccagcctctgataccttcaaagccacacctgagtctcaatatgtcacatccccagctagttaccaaacaaaggcaagagtgccatttccagaaactttgctaaatgacttgaccaatattaagtcagggtttttagaatatttttatacttctaggtggaattctgtttgcctttccttattctctacttaggacccaaaggtatttttctggagctctgtctcagtcacgtaaaaggacattatcctgttgctgtagccacaattaatgaagggttcagtgggtgcgggggtgggggtcattactcattggcttatttttctagacaagagctaccatggaagtctatgtctctctttgctttacaacaccatggccctctcgggtgttcactgcttgcctgaccattcttctttcctcttaacttcttcccttcccttcctccctactgcctcttccctctgccttctgtcctctccctccctttcttcttttcatggacggagtcatgcctctcccctctcccaaagacagacattattgagtctactccatttgtccatctatgaattggaatgagggcacttggcttagggagcattcttgacatatacaatggctggtagggagcactctcatacaatggctggtagggagcactctcatacaatggctggaatctttgtaagagaaaagaacttgtgatgatggcagacacaggcaaggagatgctgcacataaagggagggggacgagcgatgctcccacaagcacaggcatgctgggaacaccagaagttaggagaagcaaagagggctgctttctgaagtctctggagggagcttggccttagcgactttaactctgagaactgtaacagagtaccctttgtgcctgtgttgttgccagccatccagcttatggaaattgacattagcaattctgggaagatacttgtctatgtgctcttctccaagaactagctagcctgcaggaccaaggcaaccaaaaggcaacagtaacaggaaattcctgtggtccagatatttctaccccttttgagtattaacacatccattcctcccagcaactctatgcagtgttgttagagtttggattctgaaagtgagaaaacaaggttggaagtattaatatttgtccaggagagctgagagtcaaatgtctgcagtctgacggaagacattctggaccaggctgcagcactgggtactgcagagtgatgaggggtaataacaataacaataacaatccagggataatctgctttgctcctgttgggaggatgtcacatgatggagcttgacctttgacacctttctagctgagaggaggggctggtttacctctgcatccagactcctctgtgaccccatgataagtgtgaagggtgggaagtcagggttaaggggatggctggtctgagacaatagaaagaaggaaagttaatggctcacgtgggaattgaaccagcgaccttggcttcattagctctgtccctgggtacaatacttataattgtatttcaagtcataaaatggccttactcctttagctgaagaccagaagcctaaccctctctattgcagtgcttgagattttcttccacgtgttgatgccattatgcaatcgacaacctttgtggctccaagtgacaccatggttttagccctttgctgggtcaagctaatcgcactaacatttttctttgtgtacaaattttggagggcctccctcctatgatacttgcaggaattttatcataaattttgtaatatgcatagatcaggcaacatatattccatatatatatataatatagtccacatatataatatgtatcccacacacatgtataacagatggaacatacatacatacatatacacatatatacacacacacacatatataaacatatctctcttgctatatatgtaatggagggaacacagaaggcacaaaccatgtggacacatgcaactggaaagggggctttcaagatgttactaaagcatgccaagtagaactccctgtagagttcatctacttcagacagttaaatgttttttccattttagagattaaaaaccaaaccaaacccccaggacactgagacgttaaatgagttcaccgagtttgtagaaccgaaccccctggtcacttctgaggactcagtcttcctcatatccatggcttcacctcactgaggggtcagtgtgcattcatgtgacatctgtttgccttttgtcatctctctagctttcagaaagaattgtgaagatttttaatgtatgtgtgtttgcaagagccctcagaggccagaagagggcattggattcccaagagctggagctaacaggcctttccgggcatcctgacttgggtactatgaactaaacttagatcctctataaacacatccagcactcttaactgctgagccatctcttcagggccacattctctaacttttaataaaagtctctttcctacttaatgaaaaactcaaacgtgcagttttcaatgcaagaaacaattaaaaatcaaatccctccctgtatgtccatattttcaaccttgtgaatctgagaactatgtatgtgtgtgtgtgtgcgtgcgtgcgtgcgtgcgtgcatgcgtgcgtgcgtgcgtgcgtgcgtgcgtgcgtgtgtgtgtgtgtgtgtgtgtgtgtgtgtgtgttgggtgtgtatgtgtgtgtgtgtgtgtgggtgtgtgtatgtgtgtgtgtgcgtgcgtgcgtgcatgcgtgcgtgcgtgcgtgcgtgcgtgcgtgtgtgtgtgtgtgtgtgtgtgtgtgtgtgtgtgtgtatgggtgtgtgtgtaaggagaaggtgttggaccccatgatctggggttacaggaggatgtaaggtatctaatatgaatactgagaacctaaccctaactcaggtcctctgtgagagtgctacacatttttaaccccggagctgtctctctgtctccagcaaaaacaaactttacttagtaatggtgtgttcctggaacgtgtctaaatggccgtgtggctcatattttacccctacacacacagaaggaagaattagttgtgttgtgtgggagcggcattcctgtgcactcactacactgtcttttcagtgagcttgactgctgatgccaagtgaggcattccccttaataacaaaataaagcttccataaggagaactgacattgtctacgcgtagcaagaccgatcccagaagacctctgctccaacagcaaatgtaaactgctaggtgacacatacgatgatggcattttcctctgcgcaaaagagcacaggttaaaaatcttactgcacaaccattctcagttcaaagtccagctgccctaactcaagtgacacaataaactaaattctacttagggaaaaaagcgcccatgggattctttctagttgatgctgcctccatctgctcgtctatcagcaacctgtaggagacaaacaggcatttcccagttcctacatcagtcattctcatagattttggggcacatgtagtttggtaggctaatgacacaaatgtatttgtgtccaacagaaaaaatgatccctactgaatctcaaagtattctttgggcaaaatacacagaaaacaaatagaatttgctgtaatgatcaacaccacttccatcactgattcattcggtcatttaaacctagtttcctaaatgctagccgtcacctgctggatgcaataaggagctgtctgttccctgggaggcagatcgtgggagctcttaggggagtgttttctgttgttcctgcaagcatgagaaccctgagggccgggagcaaggaggccagagatggttgttgattgtttttcttccaccttaatttttgagttagggttgctcactgaattcggagctcactggttgtctagattacctggttgacagaccctggagatcctcttgcctctgtctctctagtgctgggactacaggcaggcataggctgcagtacctggtttatgcttggattctggggggatttaatcagggcaccatgcttgtatagtaaggactttactcagtgagttaccttcccgccccatggaaatgttttgagatgagaaaatttagactttgttcatctaaaatttgctcttttctttgctttctctttggatacaaatcagtgagaccagaaagttaaacctcaccaaagaggaggtgtgatttggtctagctcctgatgtcaagtggtatttagcctggtgggggcatttgtccagtgaaagatattttgatattttaagtcaaaatgtgtacaggcttgatgcctgaaaagctctgatgtctctggttaactgataaaactcttcaatatagctaagaatgacttgggttattttcatcaaaatcaaatctgtgtcaactttattgacattccaacagatttcatgcttcaacattgtcactgcgctaaaccatgctcttgacgtcgcagtctagttagctgctcctcgtagtcttcctcattgctgccacaaaccaaacaaagctctactgaatagagtatcacacaatggatctgagagaccttgtgtgaaaggctgagtcttagaccctcacatgtttatgggaacaaggaaatgctctaacaaacgacccctgtccaagataattacaaaaccagaaggtatcatgatttgaactaaattatctggataattggcttgataacctgaactatagaagacaaaattactataagggagtccagaatttcaggatatggaaattgtatagaaaaataggtcattgctatctaaacgatttctctccatattaacatataaacgataataaacaaaccacttgaacaaggcagtgactccaactccctcttaatgtcatagccatatttataaaaggaactccagtcattctttgctacatactttgtatcagaagaattatcacttaaaccctgctttaaatgtgtctataatgatcaaaatagaacaagatgggtgtgtggggggggggtggagaggtgcctcaggcattaaatcactggttgctcttctagcagctacctggtggctcacaatggactgtgactatagttccaggagatctaacgccctcttctggcctccgtgggcactgcatgtatgcggtgcacagacaaacatgcaagcaaaacacccatacttatcaaatgaaaatacaatttaaaaagatgtgaaaaaaaacacttcagtgttctgtttatttccataaaaagaagagagaacggagaaatttggagagaaaaggtaattatgtatgtcttctaaaaagagatggattcaattaagaacaacaagaaacagccaaatggataaatcaataggataaacaaagtcagccttctgtgccctggggttgcacatcctcagattcaaccaaccatgaatgggaaatatttagaaaaataacagcatctggtactgaaccatttttttcccttgttttgttccctaaacaatgcagtgcagcagctattggcctttacactttgctaagcattgtgagcaggaacgggatggtttgagcatacgccagcctgcgactggctacacactgatacttctcagtcgcacactaaggactttagcatccatggattttagtatctacagggctggaggagggtggttccaaaggcaattcccccagattccaagggaagctgggtaagtccaggggaaaggttcattgtcgtgtcaccatataggggacagcagtgtggactgtgcttggtcctttcctggtgtgctaggagctgtgggtcaccagcaggaagggacctgggcaagcgatatgcacactcatccctttatcagaaaaaccctgagcccatccgagggctaattcctaacttctgctcagacaggcaagatggcccactttgggcaaaagtagcctcaacactttgggtttataggggtagactgataaaaaaataaaaataaaaaaggaatggtctcacattaagatgaatgggccatatatcttggatgttaagaaacaaacaaacaaaaacgaaacacattctgactttaatcccaagctgttcatgagggtatgcaagtaattacttacaagataactgaagatggccttgaacttccggccttcttattgcttcctgctctaaccctgcccctgacatgttcatccaccttgcttggggctgaacctgtggtttcccacaagacaggaaagctctctactaactgagcttaatctccagtcccaccaccaattcaagttccaatgaggggaaaaaatatcctggacatttagcctcatgtgtctacttagatcccacaacacaattttgtttgtctacacgatccttcgagaaatagcagccatgagactatttatttcagcttctattcagatcagcaagagaggggcaggcagcttcctggaggaagaatcttatagccaagacctgaagggtgacgattctgttggtaggaaggggtctgtctggtgagggatcagagatgggaattctccacttgtacttacttagtgaatgcagtcagagtctgggacaagtgacgaatagtagagcactggaatggggctcacacaacagttcgttacgttgcctggaccaagaaaactgagaaatcactgcgtcttgtgaattacacatgatactggtggagccccagagatggggaaggtttccctcagttcacaaagctggttccttagcatgggacgaaagagagtttaggtctaattctatcatgtggtatgtgtttctggtggatatcaccaactggctcgtgttttagctttaaactctagattcaactctttcaagtctcactaattcaatgacttacaacctgttgtctccttgagcacaggcacgtacaggaggcacgcactgatctctccggttccgtgtgtattcaatactgccaaatccctgtaccaagtttcatgtttagatagagctgtgacaaaggcaataggttgaggctcacacatctcaagtttgacttgaaaggcttatttcaagcatgcagttgagatggcaaacactgaacacgtctcagctaaacttcgatgattaatgccgcagataataactgaacatattctactgtgtgactgataacaggttcacacaacgaagacgctggggtactttgaacttttcaacacgccccaaactaaatgccagcatttgtttttatagtttttgtaatctcacctgctaagacccttatctttgtaaaaccaccgagttcctgaataaatattgtgccacagatttaaatcttctgggggatttgaagcaagtggctgctggattttacgtctcagaagctcatatctaaaacaaaagacaagcaggaatatcatgaatgtctcaactaacattatttctgagattcaggtagtttagaagcacgagtgtaacacaaacatgaaagcataaataatgcgttagtgcaattatggaatgtttccagataaacattttttttctggcttaactatcatatagtctaataattacaaattatcatttatactcattttttggccacctggcttaactattatatagtctaataattacaaattaacatttacacttattttttggtcactggtgggaatggtggtattttagatatttgtgtcagatttgctcaatatttgttgcaagtttcacaccaagtaaaactatagaaactttatgaagttaatgatttcctaagactccatcaaaattttataaataatgatgctattatccactctgctttctctgccaagtattcagttctggctgctaccttagaatcacagttctttgcttccatcttctctctgagaacattcttcacaggtctgtagacagcggtgatatggaagcaactgcagggttaattttataattcagacacagttgtcccaccatgttacacagaatacgcatcagagctgcctaatgaatagaaggttttttttttttttttttttttttagagcaggataatgaaggggaatcttggctatgaggtaaacattttaagagtttcatgctgtccctacatgatgctcactcttccttgataagctcccttggtgccacttaaattgaaatatccaaggtgctactttgttaagaatagagagacactgtacagtttttatgagtttgtgggagtgggtgtggtatccagtatggaactaattctatgttgagatgttaataaaatcctgcttccctacttcttgaaatgatagagcaagaacaaacccccagagcaaaatcattttctctacctcagatttggtccatttggtttggatggtggctgccaagaaatctccacataagattcacttagtggaatcgcagacaatggggccagttcctcaggcagggctggaagggtggtaacagaggtaggtagactctctgtgcaccctccgaggtatccattccctccggagcaagcaacaatggtgactgagtaattagtgaaaggaatgagatgcttgattagatgactcaacaccatggaagtcacgttagtgattgtgacgagagggtctggcatgcggatctcataactcagtatgtctccattctgagtgagtggggctttccaagtgacctgaaagaaaagactaatagcatcagtgtggcaacacaggaagagagcaactcaagttcacaaagttttgcttgcctcatttgccccaaagccattttctgaaggcctatattcaacttagtccagtgccctagatagtaaacaggactggggtcaatgagctgaatgctaggaactgagtaggagctgctttctggagttggctttaagctacgatttctaggaccatcagactaatacacggcacagtgactggtctccactgtggtgtgctgaaggacacagcgcaaacacatggcagaaattcacacatccatgtgcatcagtagggcagcaagagggcttgagagtttgcttgcttataactcaactaaatccaacccagagctctttgctttaccttgtgggctgatgaagttgcttttacaaaggtgcagacaggtggccattatttgtattttctgagattcaccatcgaattcctgatgctgttgtatagttatagtttaacaaatacacattctggtctcaggataagaaatgtgtacaaagtttttaaaactgcaatcaaaggcttgtcctgtccgaaggcatttaacatcagaaaacagaacaacatcaaatgaattccattggattaggtgggacatttctgccgacattttactggagcttagtggtctaagcttcaaggttagagctccttgatggctgctgcacagacacacattttggtgatttctgcattatatatttttgtatttctcattcgtgctaagtgcttagctgtggcaatctgtatgtaggctgaatcctatttaaaaattcttcttttaaatctgatttcactttaattcattaaggaatggcttataagccctataaggccatttaaaactattgtttgtattttgtgtgtgcctgggtgagttaatgtgcattacatgtgttcaagtgcccaaggagaccacatggtgttgcaccctgtgaaactggagttataagcattcatggaatgcctggtgtgggtattgggaactggagtcccctgcaagcatagtaggttctcttaagtgctgagccacctctccagcctgctaaacccctctgggttaaaaacaaacaggctttcttcttaattggttgacggaagagccatggggacagacagcagggtgtgagactccccttacattcttggaatcagattaaatttgtcccattattttattcttttgatattctgcttaattcaatttgctaatattttattcagaagattttagattgatattcaaatctgaagttattctatacctgtactgaactgtcccgttcaggcttggtcgaggcagtggcttactcaggaaattaagtaccacgtggaagggcatggatttcagttttcacatgatgcaactacttggagatttttgtttctgatagtcagattttaagaatatgatttaggcctactgtgctctccaattttcctatcttaacacttgtgcctttaccaactcttaagtaattatttttagttgtcaagtattacgctcggagcgttcacattccaggtaggaactctaccctcaatcactctgcatagtttgagacagggttcctgtctcaggataagtcactcaagctgccctgagctcatgcagaagcctgggtgccacctcactgtgtcatcctcatacaggagtctctcagagctggcatgggtagcaactctttttatactttaatttaatgtcactctgtattcgccttttagttgtgtgacttctattgccgtccctgttggacagtagctcctgcaggtgacattgtagagtgcaagcaagtgacatgcaatagagtcaaacagaggtggtggcatggcttgagtacaagtcatctatccaaaaactcgttttcaaacccaatacccccaatgtgaggtgtgaagaggtaaaagtttatctgactgtggtgtttagagagggaccttgggtggggtctgaacaagataaggtcatgagggtcatcccaatgttgactgaatgctggtggctttataatggggagagggaccagagggggaacagaggaaattcctctcaacctatggtgccccacacagcttttggatgctgctggcagaaagcacatcactagatggagcctctttgcctggaagctacaagaccaacagcctgacacagctcttctctctaaccttagcttggtctgttgctagcagcacaacgtggactaagatcggtgagatagcagctcagtgtcttctgtcatttaccaccctgccgacccatgcttcctatttatcgttaacatgattctgctcccctcccccaaccctggctacccgagggcatctattatgcttatttgtctgcagtgttaaggtccatgaggtgaggggctttattttggccctactctctattcagtgtcaaaaggagacatttataaatgtacttccacgaatgtgagcacatatagtcattgttaatgttattgacaatttacttagaacagaagtcatggtgaatgttgaatgactttcttaatctgtgtgctactgactatcctgtgattccgcataaatgttttatccatttacaattttgatttttcagatctgtcctgcagacaggagtcacagtttccaggcatgcaatctcaatagaaaaatgtacttcggtaaattttaagatatttccaggtacaatgttagccaataatactaactcaaaatggtgttctttgaacaacatttaaatatactccatgaaacactggatttactccggtatcccttatgcttctcttcattggtaaatttcatttcctagttaaaaaatggaaattgatgaaggtatgagggccaaagttatgacttttagatctttctaaaaacttggggcccgtgtgtggtggtgcgtgcacgcctttagtcccagaacttgggaaacagaggctggtgaatctctgtgagtttgaggccagatctagtctacaaattgagtcccaagacagccagagctgttacacagagaaaccctgtcttgaaaaaccaaacaaacaactcaccccccaaacacacgcaaaaagaacaacaacaacaaaaaacacccaagtaaaacaagacttgacctggggtttccatggttttcatgggccagaggtgatgaccataggattcagctatcttggtcaagctgatcaaaacttccatagcaatctgttagagcatgtacaccctcctccctctcctggacgcaagtattaacccaccagagggggaaataaaggctgactaactccttccggatattggatcctggtgtctctgactggcttattgttatcttcggaaatcacacacattttttttttttttctgatctactgccattggtgatgcctagttttaaaaattttggcagaaagaatcagaagaatgtctgtggtgtagctgtcgcctttgtgaagggactatctatgccatgacttccaccaacacttcaccaaagccccacaaaactcttccagagttaagttggttctgcattgactactgattctaggattgcttgtttgctttgtttcttacttgactgaaggcaagttcttataatttttccagttcatacaacaaacatcacacaagctaaaaattaaattccattagtgttaaaccaacagaattccatatgctttacttatttttttaaccaaaattgtgttgctttaacaattctcagattgaagataattaagattattctgactgtttataaagaccaaattaaaaaaaaacctgacagtcacttctagttggtgggttagatgatttttgcttcaaagatttaaattatctagcatctcctagtgcctacctttctatcggcgagagagaatgcagcctggatccaagtaataattctgacagatgaactttgctggagtgcaaacgccctgctctgtgctctggtgagcaagctactgtaccgaggcttttggcagtggtacaagactggatccgtggaagcatgtgtgtatttacacagaagaggcttctaagctgcaaaactccctcctgtttggttacactaatttcccttgaatgaagtttgtatgccagccaaaacaatggtagttatcccatcctccagagttcaatccccaaagcatgaggcaaacaaccgagctttctggataccccagcaatatgctattttcttaatttctttacccatcatttcaattctttgattttttttcaaaagaacgccagaatatagtgtgcggagcttttgtttgttaatatgctctgcagtccttccattagtctccccatctcttctcattttctgatctgtttaaatatgccatggtcctgaggctgagcatcccacagtggtatcaaagtatttcatgtgtgcgaggcaaatagcagtctctcaacaatataattaaggggattcagggggaaatgaaaaactgacattgaattcaagatagtttgggctaaaggccaaaaacccggcttcggcagcaattgcctaagacaataaatgtgttagtcctgtcagtagatggctctgttcgacacacagtgcacccagggcaagtccctacatgcgcaggatcgcagagaagtcagaaggcccagtccttaccttgacagcatctggtcccagcacatgcaccccaggctgcggcactcctgcaggccgggagggtctcgttgcaacttctacccatgtgctgcttcttgtgcctccattaagagtgttccccagaacccggtattcatattgtgtccaagggcggagggcagggtcttcatcaataaacttaatgccatgacttcttgggagagtcgccaggctcctaacttcctctcttcctttgactcgcctctcgattgtaaagttctcaaccaagccattggggctggtggggggctgccaagatacgatgacagatgttggagtgtacgggaacagctctgggatggggatgtcttctgctgttcctgggagtgtccacacagtctgagactctggtgacttggaacaccctttggaggtgcaggcttctacctggaaccgataggccgtgtgagggtgtagatgagccacagtgcagctagtgacatttccagaggctgtgaaatacaggtggccttgctggtggatgttataatgggtaataactccattgcactttgcaggctgttgccaaacgactgacagcattgtcgatttcacattcacaacaaccggagcatctattggtccaggctctataaagaagaacacagccaggaagtctcgcatcttacaaactccccatgtatcctcaacatgaaactcaaatagatgagcgctctgtagagaacagagaaaggtaaaggcacagatgtacacggccgccctgctcaccgtggtctgtgaaatacttgttgagtaccactgagttgacgttgtcctttcctccctaacacagaccgatcgacatcatttgactaaagctaatgctgaaaaatagcataaggatttaaagaaatattataaatcaaggtgttcggagaaaaaatatacatgctgacagtttaaccaaagttctagaaggttttggccccatttctcgccccctaggtccccagtactgattacaaccaacaacactaccatgacagactcgtggacagcgaccctcattatacattccataggacgctgcctctgtttatcatgctaatccacgttttgcgatttatctactccctgttaatattatcggtgattttttactgggcctgtgacagagctgacgatgatctagctccttcacctaccgataaataaacaatgcacagatctgacctttaggttaacaggttttacgcctgctccactcagcactctaactgattcaattatcataaaggttcgggaggccccatgaatactgaaaaaggcccaccatatgcctgcagaggtggtggtggcggcggggcgggggtgcggcaagcactctgcagccctccagagaaattccttaattgtaaataatttcaccatgcgacacaatcaagtcaccttgaatgcgaatcccctcagcccgcccaggcaaagtgttatttaagctttactgggctgcgttaaattctgcaatttgaagggctgttaagtttttcaattgaaatttcatttaaaatgcaggtgctttttattatattgcggctttactgctctctaggtacaagcaagaacatggcgcaataacacaaatccggctcaatcactgatcagtaacagctgtaattccagaacatttagcattcttataaaccatggcctgagatctataaattgctacaacagatcaaaaaaaaaaaaatactatagccctcttttctgcccacagcaattttgacatttatgagattttttttctgtgaacattagattttattgaaaatcttttaaaaagatatagttggatttagtaattgtttaaaacagcattgatttgagtgtgaatgtgcgattcagtgtcccactgaggtctaagtgttaaaggcagccacagacttgtgaagtcagcggctgtgataacagctagttaagggacatttttcaaacagaatgggccaagttttagtcaccaactggactggtggtagaatcgtaattcctttcttgaagggacctaaaatgaagccatttttgacaatttggtcacacatcctttgtggagagagagagagagagagagagagagagagagagagagagagagagagagactgagagagactgagagagagagaccccagtgtcatagcgatgctggtgtgggtattccctaggctggcctgttggtagctttcactttaaagccctctctctggatgtgtatactccccagtatacaggtaaagaggcagttatcgtacaacatggggtatggctccgttcttagctagccctgtcatgcatgtttagttatttcccagagaaaactgagagccttgcaagctctaaatgttgttttgcaatctaaaaaaaaaaaaataaaaaagaaacaagaaaagaaataatcctctgatacggaagcttgtaaaatcagtggcagagattcaagtctttagcctcaccctgccttgctctctctccccagtaaagaataatacacgcttaaaaaccaggatgtttcccggcaggttttcatcggggtcttgcataattattccctcctcctctgtgagctatcataccaccagcttcttcagggaggagcgccaacaagcatgtagtttgttctctgtgatgagaataaagccttttctttctccggaagatgcagatagtgtgataggtaaaacatgcatgataacgagccgaacttgcacttcaaactcctacagaacacagcccttccttaaagaccactcttatcttgggaagaggagacattcaatttcaaattcatgatcccccccaccccaaagccagaatacattatattagcttctctctcggggaacctgagaaccgctccctgtgctgcctgcttcccctgctgaagccctttaaagcatcttggagaggaacagaactaggcttaattagctcctttggctagggaagtgttaaaacctgacttctggcactctttcaatttggtgctttaaaatgataaacaggatcatctagttctatatacaaatcaactgtcctgcctctgtgcagttgaaagggtcaccacaattatgtaaaacacgagtaataactataattggggtagttggctaatacaataaaaagccgtgaacatgaggaaagttacgctctccgcagtagctatcactttctaaagtaagaattcatgggtgaaatgacatgaaaaagatggttataaaattttaatggaatgataaaaggcaaaagtcggcctctcagctgaattcgtaaaacccctatacatcacaatcagctccttaactgtaaaatcaatgtggagtataacatgttgtcaatgccgctgtcactcgaggcgagatggggaagtctggcaggcacacagctcagccgcccagtgatgaaaatacaaggcaacagctctctccgagggtgtaattgtgtagagcacacccccctggagccaggaacaggagtctcctctccagtcaaatcacagattcctatttccgatgagttagtcctagcattaataaccgaaaggcagtcttattttggcaaatggcatgatctctgtgggcaactgctcgcctcaccagtaagttcagcgccagctggccagagagtcatgacccttttaggaaaggggcttgggactctccataattatctcaggcgtgtgtgctggagagaggcttgtgtgcacaggctcaacactgtcaatggctcccaactggaaggtacacatggcgttcagccgcttgggatgagaagtctttcacacttgtttgctatggttgataggttttcttgttaaagtccaaaatgttgtcctcaagctaatattttaccattctcataaaaagaagaactcttttcaataatactaactcctaagtgaacagcccttaataaccagtgaattaaaacccagggggccggttagtatatggatggcccttagacagagctatacgttacacaccagatgttcaagtagtcaagctattcaccacggatgccttagccgagagaacggagacctgtctgctttttaatcatgagttctttcatcaatttattatttatacccaacaacttcccccaagaatttttgacagctaataataaaagagccaaatgcaagaagaccaataaaggggaagggatattcgtgttggaataatgaagatggtgccagggtgaagcccccaaacaaatgtgcagagcatgaactgtggacccacacagagctgctgggaagggcaactgcaaggctgtgggccggaagagcagcagcactgcagccactgcgggagtggaaagtgcagcgttgcacagtctgcaggggagagacccactactcagggccttctgctccccgcgctcctgaggccagcacgagtggaggtcaggggggatggctgtccatctagaactgggacagaagatgaggtgaacagcagtgggtgcttcctgtggacacaggaaacaggacagacccacagtgtcagtgtctaccggtcaggagtgcagcagtacattcagaaaaggctacaccggggttaaccaggtgtaaccaacccctcagctccgctcacggtgctcttttcctcaccgccactggctgctcttccagagcatgaccatcttttccagattcttacttaattaaccttggaaaacttggttttctggggttatggtcaaaaggagtgaagagttttggattaacagcagcattggctgagatgtcaagacagcctagcttgactctgtcatgtggttgtaagtaatcactcttacgaatgtctttaatgaaaaggagcaagctggacaaagcgaaagacaaagcttacaggttgaggagtaaaggagtcctgggaagtgtaaggctgctaagtccagtgctcaaggagataaaaagtttaaagggctggtgctaaacggaataaagggagtggtggcctcagggcaagaccacacccagctaagcttccagcttgtaaagaggaactaaagaaaaacttaagcagtgaagaaaaacaaaacaaaacaaaacaaaatagaaacctgatacaaatgtaattaattgaccaggggagccaaattccaggtccattaaacagtagcacttggcatcttcagccatgtggttctggctttagagtcacaagaaaggagtgtagaatcttcctctgtggctaaagagagctgctgagaccagtaatgtgtcaggggtattcttgcatggaggcccagagagaccattgcatgaaactgtgacagtaaagcctgaattgccttggagactccaagatgttagagataccagagccatgggacgcctgctgaggagagctgttaacagggagtggaagcagcccaagacagagaagtgtgttacaggcaacgaagctgagaggatgaggagatctgaagagcactttgacatcagacgtgagatgcagaaattggagtttgccccgctggttttcggtcttgctttgctggttttcggtctcactatgatcccttcctcccttttggaacggtagagtgtattctgtgccaatgtatgttggatgtatgtgatctcctctttggttttgatcttacaggggattacagttaaaagagtgccacaggaaatactttggactttggaattttaaacagtgtcgagacttctgaagttggagtagatgcattttgcgttatgacatgaccaagaggtggagtgtggtggtttgaataggactggtcccggggctcatatatttgaatggctggtcaccagggagtagactgaaaagaatagaaggattaggaggtgtggccttgctggaggaagcgcctcgctgggggtggctttggatctatgcatcaggatgcagctctcagcacatcctgccgtgttccccaccatggtgatagtggaccaaccttctgaatgttttcttttattggagttgccttggtcatggtctctttacagcaatggagcagtaactaagctcgcacccactagtgaatcagaaaccaagccaggaagcagccttctttcctagattctgctttaacttcttgcttgagttcctgcccctgccccagcttcactcagtgatggactgtgacctagcagtgtaagacaaattaaaccctctcctcccctaagttgcttttggtcatgattttgtcagagcaacagaaggaaactgaaatagccacttcatgcaattataaaattacaaaaaatcctaggtttgatgcaatgtatcaaaatgtgctaatggcccttaaatatcatagtgtatgtaaggtgatgtatctttttatcatactgaagacaaactcattaataattatctagcacgataacaaacaaatatgaaaaatatctatgggaaccctcagaataagctgttcagattacaaaatgttgtttaataatgccactcagatttatgcttaaaaatgtaagtgtgtgttgtggctggggtgatggagagagggctcagcagttaggagtacacacgtgctattctttcagagaccctcagttcagttcccagcacccatgtcaagtggtcccaactgcctatggctctgactctgggagggatcctgtaccttgtgggcacctgtgctcacctgtaaatatttcactataccccccacacacacacttaaaaataaatcttcaaagttatataaatgtgaaattttaaatctcaagtttcaggtaatggtcacatccttaaaatgtctgatcattaaatcaattgtttgggttttgtttagaggttagcaatggtttttaggaagcaatttcaatttcattagtggatctcatcactttgagtctatggatgtaattttgtcaaactgaccaaaaaaataagcatttcattctaaatataactaaatattacagtctcctcacctggaaaatcgttattagaagcagattgtctgactctccctggtctttgagtttttctttagcggtggagtgggtgaacctcaattttacgtggggctggattttagaaggagaagctgatctgttaccatatttaaactgaagttcatagaaccatgacataaacaacaatatttatattcatatgctgtacacaaaacagctgtcagtgcatgggagttatagaatgactatagtcttaagggccaccattctgtatggcttagaaaatgtcaacattttgggatggggaggtggcttacttctcaagcacagagacctgtgatgcttaatcccatataataaaatctgagtgtggtgccatgtgtttgtaatcccagtgccagggaagtagagacaggtagagactccctggccaggaccttagcctacttagcaagttccagtctaatgagggactgttataaaaaaaagggtggacagcacacacacacacacacacacacacacacacacacacacacacacacagagacagacagagagagagagagagagagagagagagagagagagagagagagagagactacatagttttgcaagctgtagacatgtcagctgcttggcctaccactaacacattaaaaaaaattgtacgttgtttgttttgatctggctccaggtgcttgaacactatactgaccaagttggctgcaacaaacatcttttattaacacatgcttagcaggacttgaaatattcataggaagggtgcattattattatgtgggatctgtaccctagatttttaaaaatgcatggaactggatattggtggcactctgatgtaaatgacaaattatttggaaaaaaaaaaaaaaaaccctgcatttaaatgcctcgaagcttctgtgcaggagaacatctctccacaccctaggactgacttttggaggtgaagctcattactgcctacatttctctggtttcagatttttcacaggcaaaagatgctgaccctatctaaccagaggttcaaagatacctgctccccaaagctgccatgtctatattcacatatgtcatgcaattatgaaaatacaagacatgtgtggtcactatagcatcagaatatctggacccaccaagttatttctagtttaacaataccaaaatttccagccattaggcattactgtttggaccacatgctcctaggtctaacacgatcttggtgaggaaaatcacttctttcataggtctctcttcctgccacagttctgttgaatatcattgcctcaaaataccacaccagaaaacctgccatgagtgacctacccgtacaacaggtagttttgtgtccctgactgaaggaaagagactcctgttgatagcaaggaatgcaaatatgggcacgagatgacttctctgtttccttatgtaagatgatatgggaactccactgatagctactccagcaaacaggaggtgccaaggttgtagggtgattctggcatgggtctgtcagtgtaggtagctttataagccatgctccatagccttgacagaaaaactgcttgtgcccagtgccaatcattcagcctttgtcaactcaattgcacatcctttgagagatagtatccatctctgctgacatccaaaatatatagcatactgtcaccatgtcccaggggtgcgtgtacactgggtacttgccttgcaggggcatgtgactaccttccagctctttgctaatgtgtgtgacttagtgtatatgcaaagttggggaaggagctctccattcctctcacagcaatgacggctggtgttctgagttgaaacctgttagataatcaactaatacttgttcttaagggaagtgagagttggagctcacagcccatatgttacggaggtggcagggtctctgcataaaaattctaaccaccagcaatttacaagattagtcttattataagaggtgatggtagaccaatttgatcaacaaagagcgctgcactaacgggcaatgggcagccactgtgactggcatttgtaccactttcctacctgtggacagcgtggcatggccacccaccattcagtaaggactgcggccagattgctgcctagaagacactcccccacaagaaaggaaatcattccccccacctatgtgacactcaagtgagccattacctctgtagagggttgaatagttatttttacttaatctttatggagtgacaccaagcatagtatttttttaaggagattaaacatctatcttcattttttaaatgtctcttgaaaaaaatctattttgaatgtgagctttccagtccataaacctgaataccactggtgactttggggtctgatttcccagggtgtgtgcaaccctctacctgaaggttacacaggcatgattcctgaaacttgggcacatctctcctctgcacgggtgatatttggagtggcaccctggggcaaaaacatttgatgcacccatgtaaattatctaacttgattcccagagtaattaagaattggaaggaatggggaagtatttatattgttcagatggcatttacaaagataaagtggattttaagatgtaaaattgtgttgattccatcacattttatgtcttatcactaagtacttaaagtcattatggatattacaaaataaaataatcttcttaatacaaaacttgtattgttttaaatattacacctttgtattgatggctggatgtttggaaggtcactcctgtgcttgttggctataaaaccagaatggcaaatgagcattgagcaacagctgctcagaagtctgtgattagaggacttgacaggatgaaccccaaagcccatcgttcaaacgtgtgtcctccttcccctagtggtttgagctcatttcaaactttactaaaatcaaacaaacaaacaaaaaatcatacctgtcttaatatgtttgttttggtagatgtagttaatttaaaaccaaatgttatgtccacatgtttatttcttaaatgcaactaattataatttttattttcaatgagaaaaaaacagtaacgacttctttgttagttaagtaaggcagatgaatctaactttattttccacaaccatcatactccacccatctattctggaagcttcctttagtacacgtatcaaagtaaggtggtggctgcttccagcaatgagtgtagtactctcatgctacaacccagcatttcatcaccgcctgtcttccaaaagttccccaaagcatgccacatttggccaaggggcagaataccacaacatctcctttttagagtatcctgtatcctgaatgacagaccactgccatgccataactgactgtgacatttccttctctctgtctctgggtccaaccctctactctctgggatccacagttttcttccttctatagagactgactatagctgacctgaccactacactcctttcttaccctggaggagatattgccaccctatgacaggacacttggaggggcttatttccttgttttgagaaacataaggcagttaaggatcccttttgtagctgatgtttgactttgggtagttggcctacttactgtcctctgcagtcatgagtggagtccaagcacttcgtgtactgccaaagccattggtggcaaccaaccgaaactcatacactgtgaacggctggagaccactcacttcatagcttaacgatgcagaaggattgggaaataatctgtgtgtgggaaaaatgcccattaggaaggtttatgcattcaaataaataaaacaaagaaacaaacacacaaattagtgaaatcatactgcaaaaagtgttcagagataacaacataaatttaagtaatgttattttaggccatcgcattatatctacttcaggatagatagccaatgggagagaatgtgttctcctgtgtttacagaagacataaattctggttgcaaggacagtggctgctatgaggacattacacagcagttggtgaagggtcgtcacagttcagcccagtttgccagtgccaggtatgttccttgtattcatgcaaggcttaaagaatgtgagaaaaatcttactttccatgctatataaacaaacactagattttttttgtaaagcaaatgtatatccattaaaatgtttgttcacgctttcctttgtttgaacttttaaaagatacccaaattctgttgcaaataaaaactggtctattcttcggttctcatttttatgagaacatttaaaatgtgtggacattgtctaagccagttcataggaggaagcagtaggtggaatgctcactctagaatgccgtgggtggaagggcctggcctcatctggagctggtatgtgggagagcctggagcgttgttgcgagctggtgtagaccagacaacctgaagactggttggagtggcagatgcaagcctgggagacagcaggccatctggagctgtcgggaaacacagatgaattagagcagagaaaactgtgggggacatatgctgggtggagtggaaatgttccctacactggaaaaccgctcctcaggatcaacagcgacgttaagcacggtccatttaatttaacattttcattcctgaagcgctgtacctccttcctggtcttctcaccacagtgacatcagcatttcggccttaaaagccagcccccagcttcaagacagtgagcataagcccgtacccacatgtacttctattcctctaacagaaagcaaagagggaatttggtggagcaaacactgagtacctttaacttaaccccttcctaagcagactgggcgctgaaggcagctgggtcttcatgttacctgtggtccccttagctgtaccactaacagtaacaagataaggcagacttggtttcttcccttctgagggataaggagtttgctagtgttgtgctaatttatctgtaacgatgacacatttcgatcttgagtcttcccaagaaaatatgaacactaaactcctttcttagcttgtctcccccagtatgaaggctttcaccctgtcctgtcctctctcaaacacagctaactatcaccaactgagagatcccattgtgaagtttctgtgggcacagcaggaatgagtaaaactaaatccttttctcaaaaccaaaaaaaaaaaaaaaaaaaaaaaaaacccaaacaaaaaaaacaaaacctgacaggattattatttaattttcccaacaattagaatttgaaggaattgatctcacatcatctgttgcaaaacttgtcacaatctcaaaaaaaaaaaaaaccaaaaaaaaaaaaaaacaccaaaaaacagattgaacacaactctgaggcttcagagagatcatccaatgacttcacgaatatgttttcttatctttaattcagggatatttttcccctgataggtacaaaaatcacagtatatatcaacagagtaactcagttttgactgcaggaattattatcaccatcattgtcatcatcttcatcactgttaccactacatttgagttaaacttccccgagaatagtttaattatgactataatattagttattaattcatgctatttaatgttgtttactaacattgtagtgatataatgctattactctaatgaaaaccaatgaagtatcagggtccactttcagcattaacaatctctctctctctctctctctctctctctctctatatatatatatatatatatatatatatatatatatccttgtaaagtatgtggattttccatgctccgtggtgtgggagaccctgcctgtgaacatgacgctaatgagtgggcaatgatgagaagggaagaattagattacatgtttcatcaatcttcggtaagggctttgagttcatcaataattcattcacttgttcaatacgcatttacggaggctctgctctgcgttaagtagggttcttcccacggagggaaagcagcaccgagtgaaacagacaccacccttggtgagcttgtgtgtaagtagagagattaggtaataaaaagaggcaggaagggacacaggatgaggaggagcctggagaattgaaccctaaacagaagcctacacaacaggaggccagtgaggtgctttagtggggaaagaacttgctgctgaacctcatgatccaagcttgatccccagaaccatgtggtgaggaaagtactgactcctaaaagttgtcatctgacctccgggtctatgggcctcctgccacccaataaataaaccaatgtcgaacaaaacacaaaagcagcggcataagagatgaatgcacactggagtaccatggggcatggaactttatttgatattgttttacattagataggaagctgataggaaggccaggtgattacatgactttgaatggagaccttaagggaatgtgagaggcatccatgagggtgtctgtgaagagcactgtagccagagaacagaaggaagtcagagagcagagaaagctctgcctgtattaacagagcagctgaaaggttagtgtggctggagcagagggcaggcagtagacaaggacttcctcctgagtgacattcaaagtcccaggaagggctcagaatctcctcccaaatggggcaaagtgtttggtaaagagaatggaacaatatgattaaaaacttgaaaggaccactgttgtggggatggggacaggggacaagaggggcgatacaggcaccactgttgagataagccaggcacaaggtgacaatggctttatttaagcagtaatgatgaaggtggggagatattttgccatgcagccaggagtatgttttaaatagaatgtaaggaagtcaagagcaatgctactatattcagcctggacaactgaatgactggtaacgtcattcctgagctgagaggtactgagggggcccacaggttataggggagagatatagacctgtggtatctgggtatcaatggagataaggctttaaggctgagctttgtaaagttaacagtgactgagagtccagaagagggctacaacctgagcccccaaatccacccataatttgggttcagggagtagaagaaaaactaagagatggttcagaccaggtgcctaggaaggcaagttcaaaggaaaactgctgatcacctgtgccaagtgtgcttgtggctacagaccagaggtgaaactctgtatttggtgaccagggttgtttggtggcactgccaggaagagatgcagggcagagagctcatggcatactgctgtgaggaggttgacaagggaatgggggtggggcctgggcagacaaagtaagatttgacagctacattgagggaggacatcctaaagggaagtggagcacagatcagcaggtagggtgagcttcctgacagcgaggcaaggtctctgacagatgtggaagcaaggcatcacatgggtgcctgcgatggttaaattctcaacttgacagagttggagtcccctggcagatgggcctctgggtatgtgtgggggcagttattttgattaggctaaagatatggaagggtacccctttatggtaggcagagccataccctggacagggatctgagactgtacgaaagggagagctagcatacattcactgctctctggtttttggctgaggatgaggtatggccagcactttcaagctttggctaccttgactttgaatggagagccacaacacactcttactccctgaagttgcgttagccaggatgttgtctcccagaatcaggaaaagaaagtaagtttgatcattgccaagagtacaccactgtgggggatagcaagaggcagacagtaacatgaaagaagagagaataactgacagaggaaaactcttgtgtgaagacaaaaaggcatgcaggtacacatatatgtgtgtggacagccagtgctaatggccgggggacagagcagagatacacatacttgtggtacaagcagatgtgcacactgagatgtgatgctgtgaatatatgcttctcttattggttgatgaataaagctgtttctgccaagggacaggcagaatttagccagacaggaaatccaaacagggatagagaaaggtagtaggcagagtcaaggagttgccatgtagctaccgggaaggtaggaagtctgggcattctccagtaagccaagaccatgtggaaatacattgactaatagaaatgggttaataattaagagacagctagccaataagaaggcagagccatcagccagtttatagttaataaaagtctctgtgtttatttgggactgaacgaccgtgggactgggtgggacagaaacttccatgtaaggagatacaggaagtgtgtcacctggtgactagtaaacggcaagtactagcctggcccctggagttgctcttctcacccagcaagtcaaaagcaaaggcttcaggtgataccaaagagtgagggcgcattggatgctggaggaggaggaagcagatagaagtcattctcctactgagatcatggcatggctgggaaacaccgagatgactgagagcacagctcaagaacagcttccaatcttcgggtgggaaaacatccattgctaaggacttttggcctggaattctgtgagaccacaaatagtttagatcattttccccctcactcgatacatgttcttcagtcaattttcaacaactgcacacacgcaaaatgagtgttatagaaaaaggcagaaattaacataccaggaataacataaaatcataacccttgtttatttttatctaattcttctatattgaaggatgtgccattaattgaattgtgaaggaatatttgaagtcatcaacatgaaaacaaaacaaaacagttttaacatcatactaaagctcagtgcgtgaaactacaatactgctgtgaggtttgctctgaagaaaagttctctataatgctgaagtgtcagctggtctcttctgcccagctaggaaaccacacgcttatcaattctctcacacttcaattacacagaaaggcaacacatttgccaagacgtggccatcttccatgatttctgcactcctttccctccccaaagccttcgttctgtctgcttagccccttttaccctgggcccatttcctcagaggcccctttgcatgaaagcaataactgggagcaggtcataactccaagtctagtttccaagggggggtgagcttgtatctatctgcttgatatattgtccccaggatgccatgttgctcaaaaagcttctctcgagtttcatatgaccctcacggggcaaacacgctacagacagcctcctgaatcaatgcacccttcccagtaaataccaattctacatggcaatcgggtaaaacagcttcccccagctataaatccacaggaagggagtttttaataaaatttcaaatccgaccttctttcggaaggcaaaaagagagaaagaaaaaacagtaggacataaataaatcacatgctagacaacacaagatggtataatttttgaatatatgatttttattaaactttaaaaataatagacttttgggcctagcctttaaaacaattcagtcccccaatcaaaatagacagaccacacatgccctcaagccttgctccttatacatttatacaaccctctgggctggatctacacagtagatggagggttttccctttaccatgtatgtctgtgaagtctgtcagaaacgaaacaaagaaggtatagggagaaaaagaattcatcatgtttcccttatatatcagtttttattccaggcttttcttctgtctcttctctctctctctctctctctctctctctctctctctctctctctctctctctctctctgtgtgtgtgtgtgtgtgtgtgtgtgtgtgtgtctgtgtgtctgtgtgtgtgtctgtatgtgtgtgtttcgaaataatgtattcaaatggagcattaaggtgggaaagaaacctatgttaatctgcatcaaattaagataacgtacacttgggtcatagaacatggaggaaccacacccacccggtgctctcccggaagctttactcctcccggctagaattcacatgctggaaggcactgtgcatgctatcagaagagaaaagcactggccagtctctccttgctgtgaactctgagtggtccatgaagacatgcccattggtgcaatagtgagaggaaagtcatgggagcagcataaccaaccactttttcgctggatttaaggcccttcctcaagtggaaacacatctggctgtgaatctgtggcttttggcagccacaggtcctagtggataacatactagtattattctgctaaacaggcaccattttgaaccgactcccaatgaattactgttgtaccacagcttactgcatctctcagtcctcttcacagaatctcaagccagacaaaatccccgtatggagaggggagacaggcatgatgcccacacctagggagggatgattggtaaccaagagttctgaagtgtgtgggggtcagctttccttagtgtatagtcactgataaagtccagtggagccacacacccaacaggtcattgacagccacaactttacttgaagggttttcaggtatgacattaaatatgattctgcattagggtcttgctgagggaggagaaggcagaacatgttctgagaggatccagtcagtcacaaatcttgtgtgtgatagatagaagataggaacaatagcacgggattagttagtacaaaggtgggtgtctgagagcatcagagggtttgaaagttccaaacttccaaggatgctctgtgcctcaccaccactttctagggaccatggattatacaggcaccaccagggtgactttgaaatggctcatctaggttacatagggtctccagctctgtccagcccaggctccaccacatcttgtgcccatggttccattgggattctgacccttccctcaacttctcttcactgcaaagatgagagagctttctttttaagttaggtaaatttttctgttaacataaaagaaaaccatggccttttatccatatctactcctgatacgttgccgaataatctgacacctgttcaaagctatggccaaaatatgtccccatcccattctgaaatagttaaagagaagcaaggatgtctaaattccagcttccagaatgtaaaattaaagttcagacacataaactaagtcattgagtcatgaacaaattgaaacagaaggcaagactcgatttccagtcacggaaccatatgtcatttaaaaagatattaattatgggcattgtgcagatgtgctaacaaatggacagtcaaccttgagcccaaggatgtgcaaacagaacagcactgagcagttgcaagcagattagaagagattccacacccgcacgtagccccaacggaactaagattttgaacacattctatgtggcagattctttaacataatgatttcaaatccccagaattatgctctaaaatcatagacttatctttttgtagtatagatcaagagggcaagctaatagaagttaaatacttaatctcagagcacaaaactggttattgcagagtaagaatttagaccaccagagctgtgagcttgaggaaacttctctagtattttactctatttcagtaccctgttacagtaagtgcttcttagtatagaataagcactatatatattcaataaatatgctactatttaaaatattgaaaaattaagcttcaatgaaggttgaattttttgctcaaatccaattctttttataaaaataaatacctttatcttatttgcccaagcttttgactgtggtatgtatgtatgtatgtatgtatgtatgtatgtatgtatgtatgtatgtgtaccacatgagtacactacccacaaaggccaagagagggtgttggatcccttggaattggagatacatatgattttgagtcacctcatgggtggtgggaaccacactcaggtcctctggaagagcagtcagtgctcttaaccactgagccatctctctatttgaaaattgcatctctaaacttctcaccttatgtcatggttattatatagatgtacaatgtaaatgatgtgtctggctgccctttgagatattgccatcttgagtttgttggtaaagacagacacatggaagagcccactctaatactaaaaattttcgaaagtcaagccctgagcgaacgctttctctgtattatcacatttaatcttcatgaaagttttatgtgtggccagtgagatgactctgtggatagaggcgactgccaccaaactggataaaataaatttgataccaggactgacaaagcaggaaaagaaaactgactcctaactgtcctccacatgcatgcaagcacacacacacacacacacacacacacacacacacacacacacacacacacacacacacacaaataaacctgcaaagatatttctttgaaagttctatatgtatggtaggcaggactagggaaaggaaactttgttaagattaagggtgagtatatactgtatacccagatgaatctatcagctgtctgcaaacccacggtctttattttttttttttttaatttttaattctatggaatggaatctcaagctactgggccaagatatttggacctttctcctggcacaaatgtgaccatctctttcattccttacctttgaactcacaggggatggggaaagagtctccagtgtggataccaccctgaaggttggaaaaaaaattgtacaatgagtagctatggaaggaaaggggtatttttctttaaaaagttttaaggtgtgtcattaaaatctttaggagctttgttttcagggagcagcggtttggagaaaatgactctcttcatctctctgccgctggctcttagctccttcccatctctgactgttgagagagctttcttgtatccatcaaggtgtctttgattttcagaggctcagaaagaaaagccccagaggaaacccagagaactagatgcatgagttaccaattttatcccacgctgagaaatgaccatagtttcttgaggtcttctgtttccagtgcagtaagaactcaagacaaaaacagtgctggggctggagatatggctcagtgggttagagcacctggtgcacacatgaagacctgagttcaactccaaagcacccaaggacaaagtgggcacgattgcctgagtctgtaactccagccctggcaggggtgtgggggcaaggggaaggtgggaagactgacaggaagatccattggggctagctggccaccagcctggcttcaagtgcagtgacagagtctgtcacaagggactaaggagagtgagaggacactggacaccgtcttctggcctctttgtatgtaagcacacacttaggtgggcatagaccatgaattcatacagcacacacatacaccccgcccccaatcaatagctgtgttagtaaaggaagtatacgcttatcagagttttagtttttttttttaagaagaaccatttatttatgatcttagtgacagaatgaattattttagagcatatacctgaataaaacctgaagctggctcaacacttgccttcagtttctaattttctgggtgtatacctccactaggaatgtagagttcaccaacaattcagagctttgggagcacagccccaaaaatcagcacaaattatctgccaaagctaacatgggcacactgggcacctctctcacctggctccagtcactcctgtcttgtgatatgtggacaaggccctggattcactgtgaatggtttaattagaaaggcaaagaaataaggatgttcccagtacataatgggaatcacacagctagaaggggcaagggtggaccaggccagcagaataaggtggcaccgatgctaattgctagggatcattttggggaaaagcaatccacttcccttaagcactcactggatcaagcagccccctcactccctccccttgtgatgtcaaaatggaagtcttgtttccaaggactctgagaaacaatttaaggcatctgtcagttgggaaccatcaaacaccctgaagcctcctcccttcactgcaaatgccccaaagctgtggatgacgtagaggcttttgaatttcattagttacactatttgttcagctagagagaactgtcatattgtcagactaattagagaccctggaggggctggccagaatggatttccttgtatctccaatcacctaactagttttgttcttttcccttatagaacgttgctagattcaggcactggacttagtttcctctcagtgtttctaaacaccttagttccccgttgttttgaatatcacactttttaatccaatcagtttttacatcattatttgctattttcccacttgatgaacacccttggtttcgagtctattatccatccattaaaaagataattaaaaatgcatacaacaaaaataatatttgtctaactccatcctgtttttagtgtaaatctgtttattcacatgggttaaagcagttccctgaagagcttggtgctgatgaattttaaaaggttcacaagtcactttaacaagtgtattcggcttgtgttcataccactctatagaaagaggacatttagaatatatttaaatttaaaaattgtttcaaataataaaaagtaaattaaaaacaatagaggacatttaattacatttaactacacttcttagtgtatctagcacaaaaatagaccagtgaaactaacttaggcagagaagcaaagatgatactatattttagaataacactttatcttgtcattgaatctccgggtgtagcatagaatcaagtacttaagattaagtcatctttgtagaaaaaatttagccatttaatgattgaaggatcagaagaacttgctttaaaaatcattttaaccatgacagtctgttacaatagatctttccgccaaaagccgcccgaaccctactgccatgtgggcggtttccacctgccgcctgagttctgcctgccatgtggatggacaaaataatacagagacttctattatgtataaacgctgcttggccaatgactaggatttctcatctgctagctcagtcttaattatcataagtctatatattttataagacttatcagatgccttccattggcgtcctcccttgccagaggatcacatcgtgaatctggaggaagagcagaggggaaagggcccacttcctgcttgtacttgcttaaatatgagtctccttgctatgtcacttcctgcctggatcaccacttctctactacatttcccagaatcctctttgactcatagtcccgtctaacttgctgcctcattggctaaacagtactttattcaacaatcaataagatgaacatacacagaagtatatttccatcaacagtccttacagctaatattcaagttcatatttgattactcaactggagaaggaggtctaggcaggaaagactcagaccctataaggaacattgcttccttttggttgtgaccccaatctatgcatatttattgcagtctcccttcctgagtgatcacaagggaggggactagcaggtgcttatgccccagaggcctcttgaatctgttcagtgtctgtatgaggagattccaaaagactcctggtctttctgtcatggaaggttagggtgagcagacagctacgtctgaggaaaatatgcttacaacagacagcaaacccactggtgtcttggtcaacaactttaggttattgataagtcatccagcatgtggcattttgttacagcaactgaatgtatgagggaggactatctcaccccacaaggtcctgtcattcacattcttcattaggagatgtaagcaacagtgagaagaaagaaaatgcccaatgacttctaggtaccgatttcagatcaaggatctaggctagaatcatatttgagaaaaaaaattgtcaatttctcaggctgagcacattttcaagaaggcacagcactctgagtttgactcagcccatttgatagttaattacggaaatagttgaatgtgaataaaaagtatgtgtgcaggacattacagtaattgtttctagcaatttagccaggtaacttttcccttataaagcactggtgcagaccacaagtgggattaatagcaagagcttttatccccttcacgtgtagatcctcaggaatttagaaagctcaaaccaatgcattcttactaaagtcccttcttcagttttgtatgagaattccaacccagacacaagccctcgggttgacaatggtgtcctgcccacaggacatgctaatgctagtacaatgttgacacaaagcttgtgtgaagaaccaacaaataatctgatttgatttaaggcccacttcatgagccagaatccacacctgatattgtgtggttgaccaagagcacgagactaggtagctcagggacttaagagcaaaaccaaataccactgttattaaaaaaaaaaagtagcaataaaatgacacccaatgacatgctgctatactcctagactcataaagcagtaccttgctcagccatcatcggaaaagcttcccctgcagcaggtgggagcaatatgcatagagcaagagaccaaagtgggatgtcctgcagtagtctgtgtgtgcatatggcttccagtttagtgtttgtgtggtttttttgtgccggtggttcgaggcagggtttctctgtgtagccctggctgtcctagaactcactctgaggaccaggctggctttgaactcagagatctgcctacttcttcttcctgagtgttggaattaaaggcacatgccacctcacctgaataagagaattactttttgttacttctcaagctaatttaccttaataaattaaattttctattatagtgttataagatagggcatagcagcatgacctagaagaatgcgttcctaattcccaaggatattccattacatggtgaactgaataccagccatattagtttcccgccacctgggggattaagcactagagataccttaatctcaggaatccagcgtcagcaaaatgtggggcattccaagacagttgctatcctcacagcatcatgctctccgtgcggccagaagcattagccttagctttcctgtgtgaatcctgtcatctcctcccatttacaaacaggaaacctgaggccacacatggtgctacaaagtactcggggccatacaggggacaggaccagacactgggatttgaattggaccctgtgattttagaaacttggatgccaatgagaatcttgcttgtgtgtgagtgtgagtgtaggtgctacagacttcagggaagtcatttgtatcctatacgacattttccccgcacataacctacatttctgttttctccaagaaagtaagaatttgtagttttttttttttctctctctctaagaaaataagaattgaaggaaggagaaatgcttggatttctgagaccatttccatatggaacttaggttcagtcattctcggagagctcttaaacacacttagatcttagagatttctgagtaggctgcatgcgcctggagcctccactacaagacagcatgtcgctgttagacaccgtaccagaaactactgtatgttttattaaaaacctatttttgtgtgtgtctgtcatgttctcctttttatctaaaaccctaatttagttgttgttcccttaggtacagagtacacagttcataattcatttgatataaaatgtcactttagattcttacccttctttgataaatgcgaaaaaacatgtacatttcaatttcctcaatgccagaacgaccaggagcaaccccctgttgtgagtctcaaagacctttgtgttaaattaaacatcaagattcagaaactgtggggagggtatttccaaggcagatagaagacatagcaaatacatgagatgaacgaacagacccaatgcctttcctactccagtccccgctcccaaacagccactctgatcttcaaattatttctcactcataatttaatatgccacaagcagtcttctcatctcatccacttagtttttcatttttataaacattttaaataatgataattattattattgcagaggacatgccatggcacacgtgtggctgtcagaggataacttgacgaatccttttctccttccacactgtaggttttggggatccaactcaaaagagtcattgggcttagaggccagaacctttggctgcgtctgctcattgccctcctgcatttaagaggcagttggcaaaatcatcaaggaaaagaacaatttaggtgtttacaagtgagtttacttttcaacttagtagtgagaatgagtatatgctttcacttcatgtgaaccatggtttacaacatttaaacagtagccactgcccacccccaccccctgccaccacacacacacacacacacacacatacacacacatgcacacacacacacacatgcacacacacacacacacatgcacacacacacatgcacacacacgcgcgcacacacacacacacacgcacacatgcacacacacacacacatgcacacacacacacacatgcacacatgcacacacacacacacacatacacacatgcacacacacacacatgcacacgtacacacatgcacatgcacacacacacacatgcacacacacacatgcacacatgcacacatgcacacacacacacacacacacacacacatgcatgcacacacacacacacacatgcacacatgcacacacacacacacacatgcacacgtacacacatgcacatgcacacacacacacacacacacacgcacacacgcacacacacacacacatgcacacgcacacgcacacacacacaccacctggtcctttcttcctgaaccctctttaccaccaaggaagacctcatgataagatcacaagcaagtgaaaatgctgtttgctgaatcccatgggcacatggcaacgctggtcaatttaaaagacattcttatgcagttgataagagccaactgtatactcagaatatttgtgacattcctattgaagggtgtgtgtgtgtgtgtgtgtgtgtgtgcacaagatcacagaggccagaggtcaacacgatgtgtccttcgccgttgctccgtagtttttgatacactgttacacttgccaattcagttggactgaatggccagcgaactccagcggccgtcctttgctttcactgcagtgtgaatagagtgcgctgcagtgtgattacagtgtacttcagtgtgaatagtgtgtactgcagtgtgaatagagcacactgcagtgcaattatagcatactgcagtgtcaatagagtggattcatggatgacttttttttttaatggatgttgcaggtccaactcaggtcttcttgcttgaatgtaggaaattaaccaactgagccatttcttaaggccccaaattctgattcccatgaagaagtattcttcctatctgaccaggggacatgggtggactctggggtagccattccagataatactttccccatatattcacactgctaatggcagtagattctataatatttgacaatggtccaccgtgaacaagtgcctctgccagactgtggggttttaaaactgttcacagaaaggtattttagtagtatattcattcattcattcattcattcattcattcatcattgtcatgattgaggtagactttcttcttgtctttcaaggacttttttgtttaatttttaagaagttacttttatgagataaattgcatgtcttcacagaagcacacactctgatcaatcagaaaaccagactcactcatttcctctgagacacagagagaattaacagaaagatctggaatgtaatatgggcccaatgagatgacaagttagtaattaacaataatgacaccactgtggcacactaatgctgggtaaatgtatctgaacatgctttgatgaactttcctctgtaacacctgcacaaatcttctgcagcagcaaacagaagagaaaaatctagattttcacacatgagtcaaaggaagagctgtacactccaagtggacatctttcatgatctggaagcacagaaaagaggccttcagggtgtaaggccttgtctaaacagagcagcagagagccggcacagcattatctgtttctgagtgtagactttacatttttaaaaatttaactttaaatatttttaaaatttacaaacatcattattttgtgcttatgtatgatttgtgtatgtgtgtacacatgtgccatgacatgcctgaggaggtcagaggacaattttgtggagctggttctcctttctcagacatctttccagacctactttatatttttattaattcacgtatgtggtagaaggtcatggctgatattaaagaagctgtgtaacttcttggtggcaagttcatccttgtaaccaccatggaagtagacgggccaagctgatggtccccttacattttatgcactatggcgtattgttctgcaccatgctactttgtgaggctccccagatagacttcggtgaatttccccctcacttgttatatgctacactgaaaagcatcagtgggcaagttagctcagggatgtactctgatcccttcaacaggttttcaaccctcaatggttcaaccaatcaacatacttgaaattagatttgacacacttgtagagtccagtcacttctttacttcccactggtgggcagggtcaataaatgtgtgctacctctgcaagagaagataggaaaggctaaggggaagactcagatttccaggctcataggtctgtggagtcctctcctcccagccgcatgatcttaatggcctagttacaagccaatcttgtttcctcaacttgtacagaaacaaaggctgaagagcagtttcctcacagtgaaaactgagttttcatgtgatcaaagcacatggtaagtatgcaaaacacaatgaatctcattattttctacaattaatatgtgctaataaaaaagtaaaagagaaacacctgcacccagtgagggctcccttggtataaataaccatggcatcaaagaactctttctgtcaaatgaaacactgtatcatcttaacggtcctcttggcaactggtaattacaggaggatactccatggagttgtatttatgaacttctagaaggaaaaaaaaaaccctaactcttatagtctaacagtcagaaaaccctgggatcctggctaaagatgtaacccaatcatgagatgctcattaagaaatcccagggggaagagactcaggtttagttacatggacatcctggtaacagatgttccgtgaagggatccaggagcagaggaaatttccttgacagtgtcttcagggtagggagggccatgagtgttcctccgtgcatgaacactgagcctgttgctttccagcactgctgggggtggggttgggggtggatcggcattggaacccagatgcccatgatagatctttctccatcccattcaggaacactgggtggggggggggctctgaccctaagaatgttggacacagaaaactggctgacctatttccctaccagagttcagtgtcctatttacaaatgtgggatgaagttgtgaaaaagatcgtgtgacatgttcattttgttggcattttaaagattatccaattccatggctgtcatctggaatgtctcagtggcctgggctggggaggggagagaggggatcattaacatagagcttcgatctcaaataatctggtgtagtagtcagggtgtggggctcagaatttgatggggggggtcagaagatggcttggtgattaaagtacttgactcagaagtcacaagcatgaggcagcaccagagttcagatttctacccacctatgcatcttatgggtggggaagcccactggctagcaagactggtttcaaggggtgagctccatgttcaattgagagataaagacttattgagagagatacctacagtgagaaatagccaatacggagtcaggtagaaatataagggtatttaatagggaaaagccttacttacagagcaacctagccagccggcgtggcagcggtctgtactgcaagtacaaaagtgaaaccgaaagagaaaacgcagtatcgctctatgtcaccctgaccacgccctcgcaagcgtggtcaggcacacttgtagccagcccctgagtaggcgtggctacagcttcccctgcagatacctgatgtcaatctatggcctccacacacatgtactcattagtgcatactcacctgcctgtgcatatgtgcttgtacacgtacaaacaggcatgcaaacatccacacatcacatacatgtactcagggaaaagcaaaggacaaatctggacttgcagtaagttcttaggtaactgaatggcacatactggggaagcactggcaggacacaggtctgagaattcagacacgagaagctcaagtcacagaaaaacactgagaccaaacctagtggccgagtagtacaaaggttgttggtgaaacatggccctgaaacctgtaagtgaagatggaagttctcaggagactggggatgctcagtggttctaggggcatctccagggcaagggaggaccttcaaggcaagggagaacttccagggcaagggagcacctccaggacaagggagcacctccatggcaagccagcaatccctcagtcttagaagtggttattctagtttatatcaggtttgcttctggaaacttcctccttgggagcttagacaaaagctggcatacaggccaagcctcctggtttggaatggtctgcaaaaaggctgagggcaccattctctactttggccacctccctccaagtatctcctttccaagtaataaagcccaactcagaggcttaattcatgaaaagagctaattggttcctaggagagaaaatcagaaccaagagttggtgttcaatagtgttggattcaatatggctagtgctaccaccagaattctacctatcttctattatggggtaccagaagagaaaaaactcctgagattcttgaataagtcatttggagtttatttattaccagtgggcctgtcccaggcagaagggcaggaagctgccttaacctccagtttgtttgaggttttaaaagcaaaaactgtaattgtgacatatacagaaaggcagctgtggacatctgcagcaagccagcattgtttacagaagcagagaaatagcaggtaagtggtcaggagctcacataacttttaggtcagggacatgttgtataggaatttatggctggtccagaagtgaccagagactagtctcaagagagccttatgcaattaagaatatttagtaatgctgtccttagatggcatagctatagttcagcagcccactatcttactcacgcttctttttccatgctggcaacatttcagacccttcccaatgcaatagctggcaagagattcatagaatccaaggtttcagcatgtgacatggcatgtcactctataactgaactgcttcctttcatggctctgatggagcacacaaaactcaggagaaacagggcagtggagtccacgttcattctgagagggaaactagatccctgtaaccacaggaaaagttaaaataggttgtgcaaaaattaaaaataaaaagtcaccatcattccctgagggcatgatacgtagtccttcatctgagggcaacatgttctgagataccccaagagataccccaaaacacagaatataggacacacagcttaatgtatacagaatggaatacagaaaatgaaagcaacagttaatctgataactgagatggcagtgatgagcagaagctgtggagaatatacaacatggaaacactggaccaaagatggctctagacagtatgaggcttccttgtgctctttaggaaaacattcaacttaaaactcatcaattgcttgcttcagaatctctctatttattaattcagaccccagttgacccctgataacaggaattgaagaaagggagcaacagattaagtaggcaattgttgcctagagacactgcaaatgctgagagacagggagaaggccagctctgagttccttctgtatggtgcatcactcagccatttactctgtcttcccacaaatctgtatgctggtagataagacatcatccattacaataagaacggaagtcataggaagtcagagcaaagcccaaagcaaccactgaagtgtgagggccaggtgtgattccctgtattagccaacctgtctttgaggaatgacggctctccacactttcaattttttggttggacaattgccacctgcacatgggagtttcctttgcaccaactagttaataatcagaatagcacaatgattgaatgagtatgtccactaaagtcatggtctgttttccgttaagaaagaactgtagaaactttgcatcagggcagtcttttcccactacagagctaacaaaagggtgtgtgttactgtttatgttgtggacgaagggattggaatgagccctgaagggtctcaacctcactaaggatttcctcagtttcctaagaacggctgtataggtggctagatgctcttaggattttatgcaagtcaggtactgagctgctctatgataaagaagaagtcaagaaaagaatgatattatattctatgaaataaaaggaacatttcttcagggcactctaagagttcaaataaaatttcaagtagcatttaaacagtgaagccgtcacattgacacgatttttctttctaccttaaagttaaagataaaccttccttccgagatgagatgcagacaggaggattgtacttactccttttaaaaatatgatttttaatatcaatggaactcggagaggcaatacttcccatcttcctcccttggtaaagtaggggaaatgtgattttcatttaattatttctttcagtctctctgccttgccccgggatgctctgaagacagcacttaattgtgtgggggggacatgtgctctgcataaaccacaggagagcattatgcaaatgtgcagggcttggagctcttggctggaggcttgttgagtgctcagttaagttcacttcaaagttcccgtccttcttctccatggctcagaagcttgtgcctctctaaactgttttcacaagcaggacgctcactgtcaagattaccggcataaaaagtgaaggaaacttcataaactgtcacggggaaatatacccccttctttggctcaggatatgtaattttataagtgtgcaacgcacacatacacagacatacacccacagccgccacagcacagactacccattttagaaaactaaaggtaagaaaaggagatacatattgaagacagacgttatcaccatggctcttctccaagaaagtacttaggagaaagcatgagtgaaggtagatggggcgttaggtgttttgaagcacacactattttattaagaacttaaatacattttatttgctgagttgaactactttactacctcccgagggttgagatcccccaccccagagggaaaaaatggcagcacatttggaagatatatacaggaggaaaacattatgcacaactattctaaagattcataagaaccgggtgcaatataaattgtgtggattttaatataccgaaggcaaggatgagccatctgtttacgtggtagactgttgtcttaagacaagaacactatgcaactcatcctgtatcttcattgtggctctaatgttataacaggcagttaatctcatctttccgtcgtcaccctctgaacactgtcgtaccgtgccagcccattcttatttcagtttccaactctcagtttatttattttttatttctatccctttgcagtctgtcaagtgtaaatttttttttttaattttcatctctttgctcactttaagacatactgtggccccttgaatgtggacgtatctacttaaatattgtaaataaatcagcgtggatggatatgtataagaaagaaaacatcaaacacactgaataggggaagagctgtcctacctttttgaaaaccattagttttattttactttttaaaagtgggatcttgtcatatcgtcaagaaacatccgtaggcaaggaagtacggcaggctctcactgtcgcagcactgcgaatagaacaggggaagtctagaactctgcagccatacagtctactcctgaggccctagactgagaaagaatctcagtctcttctttaagcacttgccaccaggcctgcctgcctgcctgagtttgctcccagataccacatggtggatggagagaacgggctccgtccattgtcttctgacccccactctgccactgtatgtatgaccttcaatagactataaatacagtaataaacaaacacaatttttccatgaaggagaaaacagattcacttgaacgaatcatgttaagagtctcagactcaggtcctggtcaactgaggggaaatacctgtgatttctgtttcctttcaaagcagagccattgttgcctgtgggctgacctaagagcttcttggacttgccctgttctcctgagggtgggcgctctgcgagcagggactccccacactgttggttcacttccttctcttacacagtactcttcgttccactcacccttcttaactgattttctaggttaatatgtgtttcctatttcttctgcaatgcatagagagggagattcaattctctctgaaactcaaagataaaatttgactgtcaccaatagagctacgctcactgagagacagtttcattttgccaaaagtgttcatgtcagctgggctcctcattgtaactttataacctagttagatattgcctaaactatgacgataacagagatttgtttccataagaattaattgttttatgcagcttaaaattaggacttaatcatactatttggtcagaactgtgtgaggttgtgagaacaacagaatcctgtaactacagcccacctgctatctttatattttgttttccttttaaagattttagtgtgtgtgtgtgtgtgtgtgtgtgtgtaagcacaggtatgtacagtgtccatggaggacagaggagggtgttgcgttccctggagctggagtcacaggtagttgagtgccaccaaacaggtgtgctacaaaaccaacttcagtcttctgaaagagtggtgagcattcttaagagatgaaccatgtctcctgctccttattctgctttaactttaaaagtgggaattataaactatgcattatgggtgtagtttttagaataaggatgctagacttataaatgaatgacaaattaactccctccaaaagcaacttggctctaaataaaaccttatgggttcactatttagtcacatgcactattactatgtaggaacattctctgagttgaactatatccaacatgtatttggatttatttttaaaggtgctgttttaactacctttctcaatgaattgtctattagtcacaataactaattgaaaatgggggttaaaacaaagaactaaacccaacctaaagagacttcaagacatctacagttaatgttatttctttttatatggtgatggtaatattgacaagagtaagaaccaataatgtgatgacttcaatctaattttaaaccctgaaaaatgattaccaagaaaaagacagggatggcaaaaccaattttgaagaccattatacaagtcatagtgcccacaacctgttgcactcgttcagatagttggcaaatactttgtctcagccatttgggctacaaacattgacaaaccgggcattgttcctgccttcacagcccataaacatttgataattgtggaagaactaaaaagaaataagaaagaaaacttccagattttagaaataactaaaagaatgttttaaatcaccacacattaaaggaacacagattgttcctccaaatattgagttacagacattttaatcaattaatttatctcctttctgtgtttgtgtgggcacgtgtgtgctggtcagaggacactgtatgggagtcacttctttgtttttacccttttaaggcacggtctctcttattgcttctgctcttgtaccatatgccaggctaatgttccaggctagctggcctgtgagtgtctggcagattgtcctgtttccacctccacctccttcaaggacaaaacatacttagttgttttcaaagttttgggcatctatacaccattcttttaaaaacaggcaacacctggctgggctggaggggcagctcagcagttaagagcaagtactgcttaggcagaggaccctggttctgtcctgagtgcccgcccacatggtggctcaaaacaaccctttacattagttctatgggctctactaccctcttctgatctctgctggcactagatacgcgtgtgatgcacatatacacatgcaagtaagataaagtaaataacctcgaaagatgaaaacaaaatgaaagcagggcagtattcatggaaacattccgtatgcccaatctccatatgcgggtccaaacaggacagctgagcaatgcaggaagcaagcactgaatggtcaccaactacgcaaataaatattttgctgttgtatctcccaggtaattcctcagccagcccgaggcacagttgtggaaactgaggataagatgcactgggtatctgcgcatggcaacacagccaactagtaaagaagtgggtataaatccttgtttctgtgactccactgtaggaggttttatggtgtaaaaggtcagagctctaacccttgtggattctctcactgatgccttaggtgatgatgagggggaggcgatggaaagactcctgaggatgaaccacttgtagtcacttccctggtgtctccgttctttgtttccaaagaacacatttcagaagatagtggcttcctggagccttatatttttgtggagcgtctaagctggagtaattctaatcaatggttgagaccaccaattatttattgctggagaaaactggatggggtttagagggacaggtggttctgaactccttcctgattacattggcagcgtttagataaacaggagaaaacaattccttctgcaaaagtatgaaacaccaataaaaatataatctggctgtagctcgtcagtctgaagtgtgtcagtaatcattttaaactatgcccttttatgcttctgctgtctctttccgctttctgagtaggtctttgatgtaacaaagacagtttcagacaagatttcagttcatctggaaacaaaaaaggtttaagtctggaggcaaaatgccgtgtatttaaaatttatacactccataacgcctttgttctcaacttgaagatcctgcaagacttgggagctccttctcccttctcctctaagagaattcgttcaccctttgctgattatctggccactgcggctttagccagcgcttccaccatttaactacatgcagagtcatggctgacccctcccgatcaattgcggatccatacaggtttgactgataaaagagccaattagatttaagcaaattaagggacatcaccaatgtcaaccacttattaaaccgtacgctggaattccatgcatacaaaacacagatgcacagagccccattaagtgctgaaatcctaaccccattagtaactccagaccttggtggggtaaaggtcacagggaggtttcatatttatggattaacatttggattccaaaaaaaaaaaaacaaaaaaaaaccccacaaaactctttgcctagaacgcttgtaccttttccataaggctattccatagcttggattaaaatgatctttcaggatttcaggttcctgagagcacaggggaggtgggcctggaccctgaagatgaaagcaagagatactccaccaggttcccaaatactaaaaattaattttttacatacaaggttttggggactgagtgtcactaatctacacacttagccctccatagcaatagctgtctgtacttcctaacttcaaatagcacgggttcatcagatttcctttgtgtgtacgtgtgtctttgttcgtgtgtctgcatgtatgtgcatgcacacatggaagccagaggttggcatccggcgccccctcaattcctttccccttcctgtttggagacaagagtctctcactgaactggggctctcgaattcagctgggctgtctggagactcaggcactgtctgctcctcagtgctgcgtttctacttgggcactgtcatgcctggcatttaaaatgcagttctggagattaaatcaggtcctcaagaggggcaacaagtacttgttccatggaaccatctaaccaccttgtgcttctcaggctgttttcccgtgtggtgtggtgtggtgtggtgtggtgtggtgtggtgtggtgtggtgtggtgtgtgtgtgtgtgtgtgtgtgtgtgtgtgtgtgtgtgtgtgtgtataggtgtacctgtgtgcgggtgtgttgtgtaatgccagaagactccagcagggggcatcagatccctcagcgcttgagtgacagggagatgtgaacagtctgacacattctgagaaccaaactctgaaagctcctctctgaaagaagagttttgttttgttgttgtttgttttttcactcttaagtgctgagccacttctccatcccggcatttaaaattcttcacactgcatttccttctcttgcttttccaaattgctgcataagctaaggggtattcatcctatgctcatcctagcaaaagcaaccagctaggattggcaagctaaagaaacatgaagctgtttcttactctaattctctggtcagggtagcagctagatttatgtggacacagcctttctccactggacagctgtgcatagagctttgctgctgacgacctcataattgtcctcaggcagaggctgggtctgggggaaactgaggaatggtaaccaagggttactaaactcagctgtgtatgcctgcagtatatgcacatgcgtgtgcaggcccatacatacagaggcaccagggctgccacgtgtcctgattgctccacctcatcccctaaaatggggtctctggctgaacccaagctagctcttctggttcgactggttcggcaaaccacccacaacatcctcctgtctcaactgcccacagttctggggtcacagacgtccacagctacacagactgtctgtctgtcgatccagtgtgccgggatctgaattcaggtctcatgctgtgcagccctttacccacgagacacccccagcccctcattaagtcatcctgaccaacttattcatgcgctcaccaattattcatcacacacctaccatgtgccaggtttgatctaggcactgaagataaaaaagaactgggaacagtccctgctatgaaggattttactggcagaaagtgtgctggtcaaattaaccaagtgatgtcagcacacacgaaatatactcagagctgtggggtgccttagactaggttggcaagaggtggcacgctgatgaactgattaagcaggtgtatgtactcttgcaagcaagtgcatgtgtgtacaagtgtgcatgcatgcgtgtgagcacgtgtgtgtgtagtgtgtgtacatgcatgtgtgtgagcacatgtatgtgtgcatgtgagcatgcatgtgcttgaacacatgtgtgtgtgcatgtgagcatgcatgtgcttgaacacatgtgtgtgtacatgcatgtgtgtgagcacgtgtgtgtgatgtatgtgtgtgagcacatgtgtgtgtgtacatgtgagcatgcacaagtgtgtgtgagcacgtgtgtgtgtgcaagtgagcatgcatgtgtgtgagcacatgtgtgtgtgtgtgtgtgtgcgcgcacacgtgcatgtgagcatgcacatgtgtctgtatgtgtgttgcaagtgtttgtgtgcccatgtgcttgtgtggaaacaagaggaggacactgcatatcttgctacaaccttctcccccttatttccttgagacagaacctttactgagtcttgacctcatcgtttttgtgctgggttgagtgtcatttagacccaggtacctttccatctctcacttcccctcccaggtcctggggttacaggcaagcagtcatgcccagcttttgcatggctatgcaaacacagtccctcctgtttctgtggtaagcactctgacatgctgagccatctctccctagccccccaggtaatatttgatagcaaatatcaggtaaagaaaaaccaatggcattccccaacccaactctctattgtggtgtttttgatgtgtctgaaaagaatccatagctcagactactccatttcaaacctcacattgtccagcagagaaagactagaaacttttgccatcacgattagaggcgccgcccactgaaagcaaagaaatggcagggactgaaccagccaaacacaaagcaaaagcaaggagcacacagaggtgcctctggctgcctgttccctcctgcctgctggctcatttactgtccatttcagtatgaagcacagctcactggaaggcatgcaagatttctttaataactctcagcactaatttaattctacttaaacacacatattctactggatgccacatgcttttcagcatgatttttatgtgtaaatcatgataatacattttcagctcattaagtaaaaggaagcatgaactaaaaccaatttaatcaatgaggtatcacctttaaactgccacaaggtcataaaaaaagaatcatttcaaagcgataagtttcctaattgtaatcaacaacaatctaatgacgggagaaaataagtcctaatggcggcaagaaagtggcgctcactctgtctctaaagatactgcttcctctttgggtgaagggtcacctcccaatctggacttctgggtacttactctcagtggccacagtgatgccagctggtgtgggccacatacccttaaagcaaggacttagttactcctgtttctgtcacgttggtccttgtattggcaaacacaccctcatgtgtgtattgagtgagcaagaggagtgtgccaatttgagtcattatcacacacagagaagaacttatttggacatacaggcctaaatgctggacaatgggtagaatgaactcctttgtggacacaaactaaattattataaactgagaatgacctcagtcagggtaatgttgttaaaggagcaccttaggtattaaggttcttgggtgctggaagctttgcttcagggcagacactagatctcctggtccttctcctggaggatgttcagaatgcccacattctgagactcagctgacagccatgttctcgttgctctgagacacgcttcctgttcaccagctatgactaccagttggaggggggatttcttcttaccacttagacaccataaatagttaggacatggggtgggggtagacttcacattttagaataagtgtggttattttaaaacgcaccagttttaaacagaaatctttaatataaatatacccagaatgcattgtatttcacaaaggaaagggctaggatgaacatacccagaatgcactgtgtttcacataggaaagggctttagtgactgttatgagggacatacccagaatgcatttcacagaggaaagggctgtagtgactgctaacacgaagtgtttatgcagtgtgtgaatgagagtcctactgtaatagatacttgctgatccttacatagaggacctatattttaaatgtgacattgtcaatatattctgcaaaggagcaaaagggttgtatcttttcacagttctccaataatccctaaatactgatgcctgccccgataccgtctccttccaaatatgttgtcaaaatcgaaaaagtttaacaaaatctggcaagttgaagaaatgaggaaacaaaaaacccaaacagtgaattaaaaacccaaacaaaagatgtatttagtaatgttcttaagatatagatacccagagatacctgtgtatagaaatatatacatacacatgttcacacacacacatacacacacaacacacacatacactataagaagaaagcagactcatcaaagcaataacagaatatcaatagcaagctttcctaaaaactgagtcttttaaaataaaacattcaatagtgactcagttctgggcttcaggtttaacatcagaaagtctacaacagttttcacagactcacccgctggaggcatttcaacagagacggggtcactgagcacggtgcctcggctgttggaagcattcacttgtactgtgtagtgtgagcaaggaaccaagccatccaccagcacccagagccggttccctgcactgctgtggatggtttttgtgccactgagaagggtgtagttgtcacctgctgattgaagaggataattacattcaatgattattctctccgatggcttgggtgttttcttgggttgataaagatgcaatgccaagctgaattaccccaccagcacctatgagacattacatgtgttcccatcagtgtgtacactcatgtctccattcatggataaaatgaaggatgtgttagtacctatagatcacaggtgtcaaactgacttgacaggcaaagatagtatgatgtcaggtaacaagtaccatgtacacaaataaagtgtccagatggagaaatggatcccttggtgatttagtttttctttttctcataattcttgagttttccttaatatacagaaagaagtaacacccccccccaggggtaaaatggttcggctgtagatagcacactctgacatgtatcatcttcagttcaccctgtttgagagctggcctggtctctttctagttcatgtctctctaaactgggattgggtagaatagcatgaaacagttgctggggggggggctgccacatgtgcccttttccaccagaacatctttcttagcagacgaaaaagccacctggttgcataaagcaatggcttcccgtgagcccccactgtgtgacaccacctccattctttcaaatctctggtaagcccaaatctcaaatctcaaacactcagtctgtgtgcgacacagagaaatgtccaccctggtaataatagctcctctcttccgaaatcctgcataacattcatggtaaaaagagtggtggagagtgagctaagaattagagtaaaaatgagaacggtgtttgagtttaaaattgtgacatttactttaagagcattaatgggggagacattgtttttagttttagtccaaaataggagtgtgttagctactctttaaaaacacaggataaagaaccatttaaatattaattgcaagattgatgactgacttacatgccacccgatagccctcatccagcagctggtggaagtagaagccgacacccacaactaatcactgaactgaactggaatacagatgcagagaaggatgagtgaagagcaaaggggtccagactaggctggtgaaacccacagaaacagctgacctgaatatcggggaactcttggtccccagactgatagctgggaaaccagcacgagactgatccagaccccaggaacatgggtttcagtgaggaaacctcggaaatctacaggacctcctatagtagttcagtacttatccctagcataggtgtggactttgggagcccattccacatagaggaatactccctgagccaagacacgggggtgggcctaggccctatcccaaagaatatgatagactctaatgataccctatggaaggcctcaccatccagggggagcagaaaggatatgtgataggtagggttttagttggagggggagtggtaggggaggaggggagggagaaggcaactgggattgtcatgtaaaacaatcttgtttctaattcaataaaaagtctgaaagaaaaaaatattaattacatcaaacaggctgccttcctttgtcaaaatgtttcccgttatatatttaccagttctgagaaaagtgagtaaaaaccactagggtaccagatgtacaggggggaacaagcatatttgcaaggcctggcaacaacacatattagtggattgaaatgtaaaagatggtcacatgatataagcatccttacattgaacaggaaggaaatttgaatgcttaaactaattgtaaaaatatatcctcacagattagcagtaaaagtacaaagatgcctactgactgttggcattccttgggttagaatcagtcttcttcatgctcttggagtaatgtgtcctcttcaaggtgtttaatgtgtcttgagtatctagctttttgtcctcgggctagagcttacacacagtgattctcacacagtgtgtgtgtgtgtctcatcaatgtatatagtttaactgcctagtgaacaaatctacccagctctctcattacaataaacaaaacagtaaggacagctgctgacttttttgctgtaatccatacaaattatacctgcaagacaaatattgagcattggcaagtggttaagatgtaagcgcctggcatttgttctctcagtgatcattaattatgcgttaatcatcaaaatcctttgttgttcacttaagtgaccaacacaaatttgactacatcacgttgttgtcccatcaggtcaaagtccaaatcctaaaactcaccagagtctcatagttggttatggtatggccattttatgaaatatgggtggggtagataaaacttggcatatacataagatatatttatagatttattattatttcaggctgaaggaagtagctgaaatttttattgtgacaaagtctgtacagttaagtatcttctgtggccacaacaagtctcaaatgccacacaataatttgccattttggtcttgaaattgatacaggcaaagggatggttattccagagagaataaacagtgctcatggactagaacactaggaagcatatttgctatttattttcaataaaaatattccaagtttacagaatgaaatgaagtccaaagtggaagtaggagctctaccatgctgtctatgcaatgccatgcccagagagttctgaatgcagctttgagggttcactccactcaagttctgttacaagaaccacaaatacacacacacacacacacacacacacacacacacacacacacacacacacacacacacacgtcaatttattaatgctatagggaaaacagcctcatggagctggtaccaagggacttggggaccgaccacgcaccaattcatgctgcctgaccaggtcttcataacccaacagagtgcccaacctctatctctcttcttttaagagaccatgtttacagacaagaatccacacccaaaggccagtaccccaaagctattggtggaatgaattcccataacacttcctgttttttctttttctttttttttttgtctaaataggaaggcttaaatctaatacaaaactatataaagtaagaacaattatcaagtattgtctaagggaaagaaagggtaatgaagtcctttggaaagatgccattttagcacttggatgttctttatggctagctttgtgactcgatctgactgaaggccattgagagccaccagtgtgtaaggagcccttggtgccatgaggtgacaactgagtgaataaaacatggcccctgctctggagaagtctgatggttgtctaagcaggagcacatgatggcatcagcacctctcctggtctcagtatgcccagctcttgggaagcattttttagttatggctgagacaatggctgctgttgtcacacgattagctgtaaaatccccaaaaaggtcaccttaccctacagagaccgagacagatgctcatctggcaaggaagctgtgtaatctgttcatcttataaaagactgaaaattgtaaaataccacaaaactctacaattaagtcacaagagcataattttgcctgtttctagccaggcgcaaacacaaaggtaagcatacatgctcagaacactggcagaggtggcctcctttcatctagtttgtttatttgtattgcaaacagtttttgaactataaaacaggccctatcccctgttttgctctgaaaatggcatggcagagagaaatatattaagtaccactttattccaagttttccatataatgacattaatacatggcaattatacaattagttgtaatgttagtttctagctatagaacaatgattactgagtaattataagaagtatataattactcaataattatgagaaggaagcaattatataaccattttactcagctcaaaaacgaacacgtgtatctttaggagccacgcagacaagccagtgtgatctcccgccctccgcaaacacatgcttcagttcacagaacctagagcaaccgtcagggtttccactctcaaggaagttcaaaactcttcagattccaaccgaatgtggatccacaggtcagagctctttgcccatcccatcacccagccctttctcttcactctcagcctgatgactttgggttccaagataaaggggacctttgttaatacaaaaagccagggcttgcacctctgcactgacctgtgttatagcatctccctctgcctgtacagttttctgtggactggaaaggtgcatccacgttggttcagtctcaaaactaggctaaagaaggctgaggtgataagaccttctgtcactagtgtcccttttttttcagcttcagcccaccctgtgtgggagcaagagtgggtggtgcaggtccccttaggtttctggatttgagaaccacagctctccacaccctgatctcccatgttgcaatgtctagtaatgtcgctccagtccatgctggcctggcttggcacgaggcactgggcttcaagcccaaagagagtgaactagactcttttgcagaatgggctgtttttagatgtaatccagggtttgtctccactgaagtcacttagggccatctcataaaaatgcacacacctgagttgcacctaaaccgacctagtgaggatgtcagcatagaagccagaagtcactgagtgactggtccctcaacatgctgaagtttgagagctaccagctgaattatttatttgtagttatgccatttttagaaatgtagttattttatgtgtatgagtgtttggtttgtgttatgtctgtgcaccatgtgtgtgacggatgtccacaggggtcagaagagggcaatggattccccaggaactggagttatagataactgtaaaccaccaaattggtgtagggaacggaacctgggccctcttcaggagcagcaggcactcctaaatgctgagccatctctccagccaacactgaggctcctcttaaagtaatgatccgggttcatctcatctgcttctaaaagtaactggaccacacatggctttttaactggcaaagctttagactctgggcatggcagtgaagtgtttattctgttagtaaactagccacataatgagagtacaaagctaacaaagaggacatctaacaaagtccatcacaactggtgcatgagaaattttaacttatgcatggaagaattttaaagtgagttatcactgatcgctgtggcacctaggacagcaataacttcaggatttctaactttgtgttttcttctccatctgtgcctctctcactgatggtgtagggactagaaccagtcacattacatcacaaggacggtataagttttgtacagatcatggaactgatatcttattattactattgtttttatgtgtatatgtgtgggtataagcatgtgtgtgcaaaagggctggaagtcctcagttcccttagagctgggagctgctctaggagggagagctggagttacaggcagctgggagctactctaggagggtgcaggtaactttatgtgctcttcaccacggagacattttcagccccctcaatcacataattaaacagaaaacctctggcagctaataactatctgaatctctagttcctgccattgtggcaccctcttctagcttcctgggcaccagggaaaggcgcaggtatggtatacagacttacatgcaggcaaaacatacacaaaactaggaaacccacctaactactatttcaggatattccaaattttgaggagtcttcagatatgctacatcatctagttccactttcctctttttgaagaaaaatgagttagaggaggaaacattcagtgtgtgtcttctcgtggccaacagggttacttgaggttcctagcttcactgcaaagtcctgctaaactgctaacagcgtcaatgcccattttccggggagaaaacctcagtgttcttatttgtcgaatagcagaatattgtctgtgaaattattttgttaagtgagagccaacagaagtaggtatttttgtatgtcatatgcaggaagtatagatgattactgtcctgggatagcgtcctctgggattctcttgattgaaatcacataagtgggtatcctttctcattcttgtaatgttcattgtctcaaaaattttaatgcaccatatattccataattttcccctctgtgctgcactgctctgaccttttcaatattctataatttgactggctggcgtttctgttctcttcctttttacagccttattaacttgtagggaagaggtgagatgaaccaccaatcagaatacataatgttgcaaaggtcagcatagtcgcacacggcaccatcacacaccaataccgcgtgccaggcattaacaccctgatatcttattcatgtgacaaaaactgtaacaagaacagaaaatggcacaacatgaatccattctccagacagagcttataatgagaaatgacagcgaacaaaccaaactgagtcttgttaccttgtgatgatttcatatgtcacacttggggctgcttcaaactggcccttgtctgaatccaattagaccttaaggtagaaaaggtgttaactaattttcctgtttcccgctacaaaaaaagctgtatttcttccatattgagctctcaattttagagctgttgtactccatccatcccaatccctatggccttgccaataccacacctcctgaaaggcacggaaggccgtacacaggccatggcactttgacgggtgctcaggatgctaggatactttagacagcaattactagtattaagctttcgcttctttgtggaaacactattttatattattttacccacacatgtattccccatgctcatcatgctataggcctctgagtagaagggggtctcaaatatgctgggaattcattttgtaacttacatatctggacgctgcaacctttgacctggagataagcatgtgacaacacacaaaatgcttactggaaactacctacttggtgtctgtgtctctgtctgtctgtctcttttgcccccttattttctcctttaccctcctcccctctccctttctttgactaaggttaattttttttcctccaggtagccttgaatttgtgatgtcactgacagtgggcttgaactttgaccttatgcctgactctccacaatagcacgggcatctgctaataggcatggtttatgttgtgctgggcacagaatctagggattcctacatgttaggcaagttcttggctaaccaactctgtatccttagcgcatagcttttattttcttcttttattttttgacttcctaattgccttatttctcctttccaaacccttccatatacccctcctggctctctctctcctcccctctctctctttctctttctctctctctctctctctctctctctctctctgtgtgtgtgtgtgtgtgtctgtctgtctgtctgtctgtctgtctgtctgtctcttaatggaacatttcaaaagaggaagaaagaacttgcctgggaaccacttagtcctccgaggacagtgccctgtgaatacatcatacttcttaccactactgtgattattgtatgtgattttaattagttgccatcaggtaaaaggtctacctctttgattgctctttaaattactcactccacagtgtgacatgtctacgacagggaataaatacacacacatctcatcaatgcaatgggggtgcctcagaaatacatggtccaggcttctctggtgtgagcgccgtgatggctctgtcatgttcatattcctcccgtcctgtcctgttggctgctttttcagcatgtgagtccgactaccacactggccctttctcgtgtcttaagtcattgagagtcctcagaggcactgtctgtcttcatccagcgtgctctctgctgttttcccatgtggctatcgtgttactaacaacacaagtgagtggagatcaagaaggtatgccaatgctctggtcctgatgctctggacatgctcaggggtgctatgaccctaaaacggccttcagaacaaagcctattagtaaagtggagagacaatggggtctgcttttgtcaactatgttacaatctgaaaagtcagacttaacatcctacttccatagatttctctccacttttggacaacaaagtcgaagtgagcaagcaaaagagtgatttgggctaatgagttccagtcacaggaaatggtctccagcttacactctggtgggcatgcacacaaccattttaacaccagactgcttgctggtggagttcctgtgcagtctcttcatacatgctgaacatacaggtgctgaacattctgtgccaccgtgatgagttggaaaatccatgtaagattatggtctctttattccagaagacaccaaagtaaaacacaggccagagctaggttatagaacccagccagcgcggccagaacaaaaggggccagggtccccacgtgcagccccttaagaagctcccctacgtcaccccggctttccttcaccacgcccttatgggcgagtcccgggtccacctgctacctgtcccaggactattgggtggggctagggtgtctccctacaaatccaactgccattcttgatctcagagcactggctgtcacccatagacaccagggttaccaccagcagcagctcagagctccccctgctcaggtcctcatggtcttagtcttgccatgtcttgccagctcttcagctgagggtttcaaaaaagggatagtcaagatggtgctgggccagaagccccatttccaggttctaaagaggaaacaccctctttcagcacaggttgacagtatgtggaccttgcaggctgcctggtctgagggtcttggtttcttggtatcattggttggagattgctattagtcactggctgcttgttggtgaggtttttcttctaggtcttcctgtaagggtttctccagtatggctggatctctccagtatggctggatctcccgaggatggcagggtctccctaggatggcctcttgcaatgctagggaaatcatttctcaccaagatggctgccaatctttttcagcaagcccacagaagtcacagcccagctcttttgtcccactccactggttagaagcaagtcacagagtctgaccacagtaagaggaagtctttttacaagggcatgagaccaggacctggggatcacagatgtaccttccagtctgtgtgcaaagtttctaaatatgtgactgcaaattaccttgctggagagatttggaagccagttgtgaactctaaaaagtgtttgcttggggagaaggatgataaattcagtatcaccaaagttgcccacccttcccaaatgtttaaacagactggaagaaaactggagaacaaaaataacactaataaagcagctaaaggtctgatggggtgttcatgaaaatgaggaagaatggagtacccaggcatggccacacatgcctaaggatggagtacccaggcatggccacacatgcctataatttcagtgtttaccaggcttgggtaggaggaccactgtgagtttgtggccagcttgggctataaagtgagttcaaaggcagctgggctatagagtgataccctatctcaaaaaagagagatggaggaggagggaggcagaggggagaagaggaaggcagtcattctgacacttggatgtagaaggcagttaagacaagtctctgtgatgaacaacacaagtgttcacctctccagagcaggcatagaaacaaaagaaaatgctggaacatgctcaacctctccatccagccagtgagtcttcagtggtgggagaccagtcagtcccgtggagtcagagctgcctgtcctggggtatcagagttgtggatcctgtggagcttcgtactggctgagcactcaagagtccaggagagagagatgcatgggaggcaatggtgaatgcatcctcagagaacacttagtcagaatgaactgaattcctcaggttctgtcaggctctaatctctacctcactccattgtcccaagcaacagatacatacattaaaacacatgcagggcttagagaatactcaagtcttgggctgatagaagaccaactgtaagccaaaggaggtcaagttcagaacatcagagctgcccaaaaagaaatcacagagcctggggtgtgagtggagagataagcacctatagttagacgttttcgttgggtctgtaggttcaccaatcatgacaaggagacttattattaattatgaaagctccaccaatagctcaggcttcttcctaactagttcttataacttaaattaacccatatcttttaatctatattcttttatgtggctctgttacctttagtctgtgctccccatcctgtttcctctgcatcttgctggtaactccaccttctcattcccagtgtcctctgtgcctggaaatcctgcctagctattggtcatccagctttttactgaaccaatcagagagacacttcttcatggtatacaaaaagattattccaccacaatcactttaaagatgaaagaaaatatctcagagatagaggaacactggagataaaaccaacaaagcaaaaacaaaagcaagcaagcaaacagagattcttgttgtttagagtaaaaaagatagttggaattagttagatactaaaagccaaaagaacagaatgatgaaaagatttgttgtaaccataatccatcaagagagagagcggggcattataacaggattctcatccagcaggaagaaagtggtcaggaataccactttgttccagaaggattttagtttctctgatggtttgttgtgactgaccagctcacagaggaaggtgatgggactgtggtcatctgcttgctaaccagatgtttccactcacagattgcaaagcttgatggaaaaaccaaatggctgaagacagttctagataggtctagaattgttgaggatcagaagcagatctgtgattttttcccccagggacactgtgtgatggtttcctgctaccagagaggctgccctagtatcccttgtctcctgtgcagcctgtctgagcaatgctgcctgtgaaacctgtgtgcattcaaccctaacttccccacaactccccaagacacggattcaccgctacaatgcttccagttcatagactcaatgtttcctgttgttttgctactgaaaatgctatccatgacttaaaaggtctgagagcaagttcactgtttgttagcatgcattattaagcagtgggatgtttttctatttttacattaaatacattttaatagcattcataacttctgtaaaacaaagtcatgggggagcccagctgtctagggaaagcacagacatcttcagataagaagaaaggccatgccagactagaacattggtgcaagtgggaaatgcagatttgattatgccttcagacttaagaagggaagaagatacagacacaaaatcctgccttattatatgcatttctcagattgagctactaaattcattaattaacttgtgcaagaaattggcttaggaactgaacaaatgaccacaatggtaagtataatatggtagcagaagttcccaaataagccttcaatatgtaaaggtcgtaagatataaatctgtttgtaaagcaaagagtctgctatataaacgttggcctctcgagcaacaacttaatcaattttgttctgcaatttaaagttggacagtttttcctctttttaatccccacagatggtatctttccagcctggataattatagaaatgaaaagaaccagcttggatccattcagagacatttcactttccttaactgttgtttcattgttaacccagagaagttggtgtggtacagttctaaaataaatgtgtaaaaatagacaacacctcagccatcagacgcagttttccacttgcttcacagtgccctaagaatgctgcttatttccacgatggccaggatgttgttagaataaatgttatttttaaacttgacctcatttgaaaaaaaattgagaaatttagacagtttaatgagatagtgagatatttaaagtttgtatcttttaatctttgttctggggggggggtttacattgctggtgtacaaatgactattattgtgatgatgacaattacctgacttttaaacacatccataactcacagatgccaatatgaatatgcaattcttcagggagacgatcagaaataaaatgactgaaaagcagaccaggggactctctaatccataatcaaatatccagattgattgtgtcactcacacctgtattgatttcaattggagttgctcacccaggggaaaaataaaaatgtggaataaaactgatttatgagaacaaaataaatccttttgtgagcggtaatgaattggtactatttaaccctttcaatcacaaactgaaaaatctatttattttttccaagaatgctgagccagccaaaagcagtcacattaaagtgccacgtgccactacacccagccaccataccaggagagacatgccactctaaacttgatggaaggcaggggttgacatatgacatactttttgctttcttaagccaacttcaacatgtcatctcagtgatggacctcagtgttagggaggcccaaagtgttagggagccggtcaggaaatgtttgttgtacttatttcctcgatttataaggcgattgagacacaaaggcaagagttagcagcatgtggaaccaaccacatctcatttcctttgcttttaatgtaagtgttcattagttttcttaaaacttggtagacaacagctaaattgagggccaccaagggaaaaacaggatttttaggagaggtagcttttagcatggtttggaacaactatttgacttatagaataccattgttatcattttatcttgaatgaaaaaggatgtggtttgtagagaaatccagaacaattgtttaattctacccattgaaagcactggccagctatgcatttaatcagggaaaaaacacatcccttcatgttccttaatatctagtggataaaacagcgccagtactttgtaactgacttttatctcttaattttcccctgtgacacaatctacgtatgtactctgagatgtgactacacatattcactcaaaatagaagtgaagcattttccctagaattaagagatacagccgggcgctggaggcacatgcctttaatcccagcacacgtgaggcagaggcaggcggatctcagtgagttcgaggccagcctggtctctagagtgagttaggctccaaagctacacagagaaaccctgtctcgaaaaaaaccaaaaaaaaaaaaaaaaaaaaaaaaaaaaaaaaagagacactgttcggcaatttacattacaacaagatgatagtgacaagtaattttaagtgcctggcctcagaaggaaacagacttaagattccaaaacaccctgacacaatgcattctggccttttgctcctaagttcttggattttaaggtcccaaagctaaaatcttccagtagagttgctataaaaatgttactgattggcttttccgctctgctcccctcccttcccctcccctccccttccctccccttccctccctcccctccccttccagcagtctctgttctgaccaccagggaatgcaaacttcagtaacatatcaagggtttagttcttgcagagcagaaagacctgcatttgatccccaaacccctgagaaaacaccaggcatggagccagcaagatgggtcagagggtaaggatgtgtgctgtctatccccacatgtgaaccatggcacccacacccctacacaattacatatacacaataagcaaacgtgaaaaataaaaaagccaacaagggtggctcacatctgcaatcccagagctggtgactcctgggctggccaggcagccagtgacacaccctgttccacaaaaagtaagtgcatatccctggagaaatgatacctgaggttctcttttagttcccagaaacacatgcacacacgagtgtgcctgtacataaacaaacacatgaacatgcataaattcatgcatatcagtgtatatgtgtacatgtgtgtgtgcattcttacatgagtacatgtatacacacacacacacacacacacacacacacacacacacacacacacacacacacaaagaccatatggaatccatggatattcaggaacattttctatccagttctcccccatgcccaccctaccctacatagtcccaacttgatttttatgatataatatacgaggggtataactttacaaatatttttatgcatccatgtggctttttttcttttaaaacaattaaggaagagaatttctagtggccttactctacacaaatagatatggattttaatattcccatagtggctttatgtttattttaataatctcaaattaatttcagtaaacaaataattgagcagatttttctgttggggcatatgcaaattgtatgggttatatttgcagtgcaaaacttgaattagaggtcttttattcaaatgagtactcactctctgtcagagtgatatccagctggtgtcacataatggagtcatcctgagaggatttttttaaagcatatttttttgtcttcagagagctggaaaaattgttaacctggagatttataaacatgtgaagaggctgtcgataagaatggcatgcttttaaaacaccacagagacgccgaaggttctgttaacacaataataataataataataataataataataataataacaacaacaacaacaacaaatgaacacaattagaaaaagtaaaatacgcagacaaaactccagcaacaaataatatgacatctttatgtagaaaataacaaaactttactggatgatataaactgcttaaatgaatggaatggtgatacattttcaccaggtgagaaacatacaaagattttaagtcctcaacaataaatttattagggagaagagtccattaaaatgtctgtggcattttgttcaagttaatctgacatgcagtcaggagaacacgtatatgagagcagagatcttcaataataacgaacaataagctggagggtgagataaaactttacttaaagatataatggtatccaggaagattttagctgttagaatcagcaagattaattgagcacacaggcgctctatcagacagatacagtaaaaacaagcacctcagaagccacaggcagcagagctgtgaagttaaatcttttaggtaccaagcttgccaagtccagcaacacaaatgctgtagatagagaatatgtttcacacaataagaaacaaacatcacaccacccaaaatcatagtgccattttcagatctcagaagcatatagaaatatgtaaggtaaaatttgtaaagttgcaatgacttttaagcatcatccgtaatacttaagctgccttggatatctggtcaaattttaagacctcaaaaaaaaaaaaaaaacaacaacaaaaacccaaacaaacaaacaaaaacccccaaacaaacaaaaactaaagcaacctactattttacctatcatatcagcccgggtacaggcagacgggcatatctgtgtgttcctggaaggcacctggactgatgaggctttcttgaaagcattttgccaatgaaaatcaataaatgatctttagaagaatcctgaaactgggatttagcaactttttagaagctggaatgaaggcgagggtgtaaagatttcactagacccaagataaaggataaatgggtgtttattggggaacacttacacagataataataaagaaccatgggagcgcatctctgttcttcggattggattggctgacacaagagaaagagcccaaacaactaagatcacacctcaggcctccctctttcctcttccaaccacctaaagtcatgaccaaaggggtgtggcctccattacaggttcactgcaagatgccactacactggaagtcataaagaaatgtgaagaaatactcaaggatccaaaatccatcaacaggagttaatatattttggtgtgttcatgctagggcatagagcatgtgcgcacatgtttgaatgtgtgtgtacatgtgttggatgaggggatgagacatatccatggactaatgttaggtataaagtcaaatcccagaaatgttcatagtaaatttcaaattcatgtatgtgtatatgaatatatatacccatatgtatatccatgcatgtatatacacagagagaaaaatgaaaataataatacatatataattggagaaaaggggctaactacctacccaaactagtaagtctactgataataagtataacttatgaaaatctgcatttcaactgaagattttgagaattcttcagttattgaaacttgtagccaaagtctttaaaaattcttacatggctttgaggaaacaacttctgtctcactctccagcttcattttatttccttctctatgcatgcctgtgagtatgtgtgtgcacatgtgtataagcaggcatgtatacgtatgtgtgcatgagcatgagcgtgcacgtatgttgggaggacaggcacatgggtatgtgtatataaagaaatagaagggcaccaggcacattattttacagcctttctcctgggtctcacaatgaacctgatgcctactgtttcagtcagtcagatccagggaagacattctcctgtctccacactaagcccccaatactgggtggcagtatctcatgaccatgcctgcccttcacaggtgggctgtggatttgaactcaagaccacttgctttcacaagaagtgctcttactcagagacccatttctacagcttacttgtcatctactgtgcctcaggcacactgacatctatctatctatctatctatctatctatctatctatctatctatctatctatctatcatctgtctatctctagattcatctatctatctattatccatttaatctatcatctacctatcatctgtctgtatatatctatcatccatttaatctatcatctatcagtcatctgtctatccatcatctctctaccattgtttgttttgttttgttttaaccataaccccatgcttttgtccatcttacaaagcaaatgcattccctctggaatcctcttcgtggttggccctttttcatctgtttcagtcactttaaatgccattggcttgaagacctttcctaatcctcaagatgtattaagttccttatgcaataccttagtcgcaactgattttgacttaacttccctggagtctgcaatttcatacttttgtatggatgtttggctaattttcatctttcctgtgacatttggtgctcctctctgcaggaactgtacctccagccctatcattatctctcctgcttcatgggacaagctagatgtcagtttgttctatgaacagatgaataaacatttgaatttgattctgtgttttcaaatttctctttttcggtataaaagctcattcagtatctctccaaaattacatgactggaaaaacatgtgatttctcttagcaaatgtttacatattaaaaatgcacacatttgaaaactacttaaagttgagttttcttcatcattccacaagactcttagatcctatgtcactgataattcagcaagataactcactaagaaaaatgccacttttaagtgggctgttctcagtatcaggactgagtattcccatgtgtgtctgaggctaggggaacaagagccaagactgttggttcccatgagcctgtcaatgaaggaggagctcttcacattcctcaagtgtttattcctgaattccactaagaggaatccgggaatgagagaagggaatctctgtggaggaatgtgcgatagacctggatcacgatgctctttcaccgtgtgactagttctcaaactttagtctaaaatcaactcatagttgtttattagtgaatgccttgctcaaaattcagattattagacttcatggggatagtccatttcctcaatcatctgcaagctggcattcacgtgactttctcaacaggtgctgaaaccttgtcataggaaaattcgtggacccacaccagacagatgcatggtggggccagcacaggttcaaacacatctgcttcttggatgactgccacatgcaaagatccccaagcaaggtttgaggtactgctaaatactttaagttttcctcccttttaacagaaagaggaattttatttttccgttaagcaaatccaatcatgttgattcactgggtgtctctggaaggaactagaatgggcacagttccctatgaagatgctatgcagagtttcaggtgagaacttgcctcaggccctctcatggtctgggtctggggcatctgtgggtcgagttctctgagtctgtgtgcaggctatggcggctatttccacaccatcactgtgttgttgtctccacacacacaacaatgcaggtgctctcactcattgtgtcaggaaaacggccaattagatatcagacacaaatccaataagctgctgcatcagggttgggaggagatgaattctaaaacaagtttgataaatttatgcttaactctattcttgcagaaggatctgccccaataatacatttctatagctttattggctgtgacatgatgtataaccagaaatgtcaatatatgctgtaaatgcaccttctctaaccaaatttttaaaatgacttgggtcctatttttgcatacaatactgcaattattttcaagtcagacaaatgtgcctttaaataaccttcatgttcatagttacatttttcttatttccagaaatgcatccaaattttatgcaaggctctaacagctacagctttttcttttcttcttcttgtgtctttacatgcgacattgtttcccaatttaatactgtgtgtctacgttttaaaaacatctaaaatggtcaaggagaaaggtccaaggttgttatcatgttgtctacaaaccaacaaattccctaccacaacaatcatttactttatacctgtaaggaaatatacagtcaaaatagtctcttacaaatggatccatcctgtcacctgtcacttgccagtccttgatgagaatttgtgtaagagagtatcatggctgccttatacttctaccgggtgttaatgtctataaactggaattttatttaaaacctgggataggaacgtatattctttgaccttatattctcaaagtatggaccctggagtgagtatgaatgaccctcagaaacagacctaccaagagacaggtcaacatttggtacattcctttacctcagcttccctttccctccaccctggaaaattcactccacagcatctcacttgagttcggtctggctgcccttccctccaactcattacagagaaaatgaagtcaaattgcttgaaaagaagccgcctctttcatcttcccaccaactgacacacagctacaaagttctccagcgggattccaagttacaagctgtcctgtgtctcgggaacaattccccccactggagtgtccctcccagggggcagcatgtcagagttactgcatggcctgtatttccagctggactcggaaaatacacagctccctccacactgaaaaacaggccccagggacaataaaacaaagcaatccctttcctaacagccccagccttcctgcagtctccttgcaactcaaaagaattcccagggatcattattttcttttagcttcccaagaaaacaaatgctccctatctcctttctctttgtaattttgataaaacatggtttattggtggtggtggggagtgggcatggggaggagataacaggcaaaagtccctggatttctctaggtaaccttgacccacacactgcattctctaagtttcccattatttgttgagatctgtagcatctgaataggcacctgctcttcccggtgactggcaacttctaggcaaagtaagtgcactgcggtgggaggatttgaaggagtgtggctctctctctctctctctctctctctctctctctctctctctctctctctctctctctctcacacacacacacacacacacacacacacacacactcatgtctcctgtagctgacacgcagcccaggagaggagagaacagctcctttatgcggccctcctttgttttctgcaggaggcaagtcccttcaatatgaaagaaaccaccaccttctaaagggtctggatgctgtgaaagccatgctactcactatgtgtcaaagcatctccgatagccagaccctcccactctttagaacctcccccaccatcttacttctggcacagaagggctcatcctctgacaactcctatctaaatcctggttttgccacattctgctttggttttcattgacaaccatgaaaaaaagacttgcaggcaaatcacgaaagacaaagaatgtctcacagtgtaggagacatgggaagtgttttcctgcagaaacaccaggctctccttgtgcccttctgggcaccccaccttagggctgtgctgcccattccatctcttcaagtctgaagcattgtgatgattccaaattattctccactagaatgatgttccctcaccagatttctatttaatttcctgccaaaacaagaagtatctattgtagaaaattaaagaccctagttcataaaaaagggggaaaggaagggggaaagagaatataagccattcctagaggtagtgcccctattcttttcaaatcccagcttgtccttttaaaaaacagtcctttaaatgaatattttcttgttttttttttttttttgtaggatgactgtcagttcttctgagtacggaaacactaggttaatgctaatttcacattcatttttccatcccctttccctggtgtttcctacaccttcttccctccattgtttgcagactccttcctgctagaggtgtcccttggaggggtggggagagggagcatccaataaagcatatgcgtcgtacccgtctctgcttcggatgtagaacctcagaaatctccaatgtcatagttgcagcaggaccagattatcaacctgctttgacctaaaagcgtttccctttgagatgttgcaagatcattgccagtcatgctttttttattttccccatgatccacaacctctttctcaaatccgtgtctttattctgtgctacagtaccaagtgggggtctgggagagggagcctggaagaggagccctgagttaccgtggggcacagagggcttagcactcagtgcatcccaggcacaaaacagcctgccgggtgtcagctgctgaaaaccacttcccagtccattcagaggacggataacggagagctaaacaattcgcacaagattccacagtcatggctggggaaaagagcagggtgtgtggcgaagacacagaactatatactaaaaataggactgctctgaggacgcccagaaagcctggtggtggcagaggctggcattggggagaatatgccccgaagaaatccagagcctttctctttttctctttctctatttcctgtcttgataactggatagttaagtaaaatttcagttgaaaatgtttggaaagtctggaataccaacagcgttcaccaaaatccttgggacagactgttttcatgtgtgtgatcaggtgaattaaatatcatttgtaattttgaagccagtttcatataaggcaggtttctgttacttgctataatttactgcagtttttattgaatccacagattctctttatttaagaatagcacaaattaaatatgtatgaagctattataaacctattacctaaaattaaaatttttaatgaacacatatgagttaaataacaacaacaacagcaaaaattcccaaacactgagggtttttctagtgactgctggacgttcacagctcacctcaatggaatagaggaagaactgccagccagtgaagggcactgctcaccctaggaaaatgaactgacatcctaagtgtcttgaattgaatggatgagggaaaacaagcagaattccaagaactaagtgccaaatcttactgcaagtggcaggaaatggaaccttccatttcctggtgatgaaagggcaccctacttaattctgtgactcagggttctttgtgcctctctgtcctcacactgtgctttcacactcaagcccatagttaaaagaagggagatccagctttcccccagaatctttccctcattaatcctgttctatttgtcatcccaacacctgggttcttgtccagaatgcttgagaatagactggctggtgtacctcttacctcacctgtttgcaggtagcctctgggtccaaattccacaaaacaaatgatgagccagaagtaaaaaatggaaacagagaaacaagtgcagctctacctacatgcgcttacagcaaaggtggacacagaggactctttgcaaccctgttggataaagtgacttacttaattagtgacttttgaaacaactggatgcttagtgttcggcctacacactgtatactacacttctgagtgaaacagtatggacatttgcagggaaggttttaagtgctagggaaaacatcaatgggaaatattgcaatgtttagagcagattttcctaatatctaaggaaattgtacagctcagtaaaaagaggcagcaaagattggcaaagagcaagttcacagagaaaacctgttcatttacaaatgctctacatatgagaattcctccaaactgcatcctgataagaggattgcccaatgcaggtgctacgaggcactgttttcagtaaaccaggccagcaaaggacagtgtgacaatatgcttatcagattgtggcatgcccacatttttccaaacctgcacttctgtggactaaaatcggaagtatcttgcacacttacaacacatttccttccccaggcaatacatttttctcatgtttttttttatttgtttttattttgctcttctctggggaaaactgtttctcccaccaggcaacgtattttaaaggaaatcatctcactaattaatatacctgtaaaggtataaaatgggatactaatccattgtggtattattgaatgaccacagacttggacaaatgtctgttaacaggggcccagctattcaatgaaggtgcatgaacacactgagtatgtaagctgtggggttctaactgccgtgtctctgaaacgactggtttagaaaaacaaaacaaaacataaaaacaagaactggtgcctaagcatgcaatttggtatcattcgtgtgagaagttgtatgtgtgggaaggagaatataataatttattagaggaatacatgtaggtagatggatagagagacagacagacagacaggtggatgataggcgagactaggcacaccagtttcctctgagactcatgaacagattggaagctttgactgcttcttatttttgtcttttaagttttgactcatgggagaataacatctgacaaaaggataatttttaggaaaagaaaatcttcagatacaggctgcctaagttgttccaaaatgtggcactgactttgtaaagtttttggttcagaaccagttcccacatggaacagggttcctgggtgggtttctgcttgagaaacaatggcctaggcacaggcacctgttcttgcctgtcttgggaatcctgactgctacctcttcttcagcagccattacagttgttaatcatgtcaggaaaaaccaattagccacccgacaattcgggagccttgtataactctgggaagcagctgatctcttttataacggtgatgaattcacatttaatttctttcttgaagagccacacagacttccctgtcctcactgtatgctacctagctgctgatcgccaacaggatgagatgtcaaaatccttgttcttgacattggacaggagttttccagggacaagaaccaactcaaagaggtggctggggctaattccaagatgctctctctgctttctgccttgccccccctctgactccgagtcaagtgcacaccacaggaccctctaagtcaaatcttgtaattgcttccaatttgtctgttttgcttttggcaattaacaaactgaaatgttaccacggaggagctcatctcgtttataagactgggtttttcccgccactaaaatatgcagccgctctgtccttcactaccggcaggagataaatggctggttttcgttgctgaagaatatataatggttaaaaagtcacttttttcctccagctctacataaatcacggaactagtcaatatttaataatgcttgccttggtctggagtcccttgatcacccctgtcatgtgtaatagctccctctccgatatctttgacataaaagcccagctttactgaaatgctaacatgtagagggtcattacggatcgacatttaccttaatctgagactgccaaccatgaaccgataaattccagcagattccactgggagaaatcagtaaacttctcagtggaaagaagtgaaagaaaattctgccgaggacagaatacattttccacaaaggctgcttagcaaatggattctgacttttgaaagttcttccgctgcccagctttgcaacatttaataccattttgatggtttgagggacgggatgacaaccgaagatgacaggacttagaaggtaagcagaaatgttctgtgcaaaaacaatgcaagattaaacacgagggggaacatggctcttgcattattcacccagctgcctgggtagaaatagctgggctgtcatgggtccggcctaaatgttgcttctttttccaaatcgatcatcactccttcacctcataatcttacgagtgcttcacagctgaatacatcaaagccctgattgcataaaaaagggacaggccaatctttgaggggatcagtacagcctttgccttggagtccaccattcactgagcatttgcttatttgcctgcagacacactatgggaaatttaggaatacctttctcagagtcttaaaacacccatttttctctctctcggtgctttttatacatattggggatgcaattaagtctgacaagaaggcacgatacagaaacaaacattacaacctggagggtactgtttttctcttcactggagagtgcaactactccggttatggctttgcccagctgctattggttagaaaacaaatattaaaaattggtatgacttcttctggaaagaagtgacaaaagaaacaaatattactagaaatacaaagaaaagtttcctgaaagccatgtcgtacagtgctccgctagggggcttacaacatgagttgtgctaacagaacccaacttaactgaaactgagcatttgatgatatatatatttgaggaaccccaatagcccaacccctagcttccaccctctgaattaccaatttagtagagaattatgaaaatgataagcagaaataacctatctagaacaaagtattagaatcaaagctgaagtctttgcacaaatagtattttcggcttgtgatgtgttttaggcaaggaaagggcatatggggactctcctctgctataaatgcagttcaacatcccagagtgactgtgaccacagaccatggcaacccccagctgtgtgctgacttgttcaatacctatggctatgtttaatttatacattagaaagttaaagactaaccagaagtaataattaaactgagcaactctatcactatgatagaaaagaaaccatgtctttcccttgctttctggaatcttctatttaacagtgttgtactgtctgaacacatggggtatgtggctgagatgcccgaaataaaccatctttgttccatgaacccagcctgatcaggtttacgcataaaaagaaccatctgtacagtgtgctgagacacacattgctggatcctaccccagctctggccatcccgacagctctggggaccacacactaagcatggcttttctaacgcatccatataggttgtatgtttaggggaaaaaaaatccaagaaatgaaaattaggctaaaagcaagtgttcaggtacagataagcagttttctgacattattgaaggtgtaagaattgcacacaatttaccttgatttgcatagaaacttccagtaaagaggactgagtaggttaagtgcccattagggtgaagaggtgcctcccatgtcacatgagcttctcgggatccctgagctttgacaagcacattgaccatgccttcaggaggaacttctagagtccagttttctacctgtgagtataaaaagctttattggggctgcaaataaaataagtgcatactttgatttgggcaaacctcttcaaagaatctttttgctgcaggcaaaccacggtgacagagttttgtcacttggagcaaagcacaccttgtattttcttcctcctgttgtgaaagcttagagttccagttcccagccaagactatggcttgtgatgtccagagaattgtgattggctcatggagagcctgcgtgcatggctgtgcataaccacagactattttcagaatggcttaagaataatttctatgtgattgaaaaaggaagagagatataattgctctgtgtcccttagttcccaatttcctgacaggagggatggactcttgaatttgagaagaagtcaccatggcctctacactccccctcctttattgtctcctccctgtctctcctctctctctgtttctgtcatctctgcctttctttgcctctctgttgtctgagctgtgttcctcttttgtatgagaatatggcaccaccagatcaagttccctgaagaagctacatctacattaaagagcctaggacctcttgtgtttgtgaagtgttgggatactgaatacccagtgctacactcatcttgggctatctgctttctgtactccaaatagtcattttacacccatgtctgaatctgtttcataccattttgaccatcaagtgacatctctagaatgcattcactgatcagactacaggacttggccaatccaaaagccttgggcagcatctaggatccacagtaaagtccctggcttttctgtagtctgcctatctaatgttcccaccactgtatttggtgactgcagtgatttcattcattcattcattcattcattcattcattcattcattcattctttggttctgtgactacaaaacattcatgaatgtttctacatgtaacatgttaccaagagcaaccagaatctacatttctgggtcatgttcattcacatttagctcagaataaactgcctctgattctccatggagtgtggctacatttggcatggacagcttcatgatggcatcaagaaataaatgtaccatggtgtatctcaccaagaaataaatgtaccatggtgtatctcaccaagaaataaatgtaccatggcatttctcaccaagaaataatcacacaagaagctgatgtgatgttaacctgcctgtgcagaagaggaagaaggactctgaaataataataataataataataataataataataataataataatcttaacctggtcgagagtcagaaatggcctgataaccaagtgactaccatggccagctgtccaaaggaagatgcagttgttggtaagaatgtagaaaggggctcacaatctttttttttttaaattatcttttaatctgtggctagaacttgatagactaagtatcagtggaccatatttgacctttcaaagtttattgattatgtaggtactctttaccttattctttgtgtatgcatggtgtgtgcatgtgtgtgcaggtgcaaggatgtgcatgtacatttgggggccagggagcaactaaaggcactgttccataagagctatccattttgtttttaagtcaacatctctcactgctctagaactcatcaataggtgtaggggaagctatagccacgcctacttagggtctggctacaggtgtgcctgaccacaccttcgagggcgtggtcagggtgacttagagtgagaggttcaggtggctgggtttcactttcagttcccttttcagcttgcagtactgcctgttgccacgccggctggctaggtcgctctgtaagtaaggcttttccctattaaatacccttgtatttctacttggctccatattggtaatttcccactttaaataggctacacttgcttgttggagctccctagtcatcctgttgtctttgtcttctgagagttggggttgtcagtgcacaccatcacatctggacttttaaacgtgggttctagggtctcagacaaaagttctcatgcttttaaagaaagtgttttgccaactgaaccatgtctctagcctggaccttaattaccaagtacaaacaggctcatctactccttgcaagaagatgatcaaacatgagatcccgtgacaggcaagtattttcaattgtgaaggcttgttttattagggtgaatacatttttccagttatgaaaataaatgtgagaaagactgagtggtttttttttgtaactgtgaggttgcaaatgttttatcattatcagagagaggctctggggttctttggagatatgctttctgctcaaaccttgcttcagtcacaaatagctatgcataacaagccataaaaaaccagattggaaaaaactcattcatcaatataatgtttcataatgatgcagctactttaaatatgtctgtgtgtacagttccaatcattatataaaaaggggttaaaaagatgatcatgagattggataattaatggtaattccagataattatattatttacttcaaatacctggttaattttcttcagtgtttagataaacattctgacttttactctacactaaaattgacaattataccatttttctctgactaggagtttttttaactaaacaaatctatcttgccttgaaatgaatattatggaaaaggctctggggagtttagaagttggcttagctttgacctaaaattttttctttgaaatagaaaataaatatgagatctataaggatgccaccaactaaccatctaagtgacactggagaggctgccttaaatgccctctcctgataatgagattgaggactaacttatatgccattctagagccttcatccagcagctgatagaagtggaagcagacagctacagctaaacactgaactgaactggattccagttgcagagaaggaggagtgatgagtaaaggggtcaggaccaggctggtgaaacccacagaaacagctgacctgaaccctagacttggcctagagactgatcactgggaaaccagcatggaactgatccagatcccatgaatgtggatgtcagtgtggaggcctcagaaatctatgggacctcttgtagtggatcagtatttatccctaggataggaatggactttgggagctctccgtgagccaagacacaagggggtgggccaggccctatcccaaaggatatgacagactctgaagacctcccccccatggaagacatcaccttccctggggtacagaattggtatgggataggtagggtgttagtagggggcaggggaggagaggagggagagggacctgggattgacatgtaaaacaatcttgtttctaatataaacaaaaaatggagaaaaaactaaaataaatttgagaacaaatgtatgtgaaaacacaaacatttcaacaaaatttccattcttaacaaagctcttagcatgctcaagaaactcttaggtaagtaatatttcatttaatttttcatgctaaccctttacagagaagcattgttgggaaatctgaggtttcatagaaaaagggaccagaaagagcaggtatggggcagcttcccctgtgtttttccagcatcttcacagaaccatgcctgtgcttatttttctttaaatatttattttactagttttaattacattatgtgttggtgtgtgtttctggtgtgggcacgtgtatgtgagtacaggatcccacagaggccgttggttttgctgggtctgacgtctaaggcagttgtgtgccacctaataagggtgttcggaaccaaacttgggtcctgcaagagcagcaggtgcttttcacctctgagccatctcttcagcctctaaaatattttcattttatatcagacatccttcagaagtcaaaaatgttctttaaatggacaataacagaacaaaccgcaggggaattagatgggaatagagcaattctgccttaatcaccccaaatagctccctttggtcaggctgcgatgacaaaacccattgagctatcaaatccttactctatcaaaacagtaagaatgtggaattgatgcacaaatgatttattttccaaacccccattttaccaaatttgtagcattttattttcatcttaaggaccatttgcccacgtgacacttaaggctgtgatttatatttgtctacgagcatggtaaacagtaggacaggaattctctgcatgcatggtaacaatgctactaaatttgcaaaagatgttaaaaaaacatactgcatatttctttctctaaaatgtagaaatcattaagggttgagctgagtacaagagggagagagggaggaagagagagagacagagagagagagagagacagagagagacagacagacagagagagagagagagagagagagagagagagagagagagagagagagagaagtgccaagtggaggatatggttctgagctccacagcagtgtggagactggaatggacggggacctggcagagtagagtttacaacccagttctcctttcccttatcaggggctgtggtatttgatttctaaggtgaacattgtctgccatctgtacagaatagagatcgatgactgtgtccccttgcttaaggtttctagaatatcttggggatgaggtggggcagccagaaccacaattcacagtgtacactggggaaaagtgcaagagttttcaagctttgtaagaagtatttctttgtttcaataccaccccccctattctctgaatggagaaatggagacctgctagcctactgtcattcccgctgttaagggttagtatccatcagaggggtctgcacagtaagtgcgtgatagcaacaccgactcaagcttggtcttggtaatatgctgttttagcttcttggaaagcaaccaatctcagacagggttgggggatgtgatcaaaagtaagggagtacaaattaaattgaagagctggagttttcatggtaatatttatataatatactcttcaatgaagatagagtgcattaaaattatagggaattagcaatcattggcaaaaatacctatgagttattttaataaactaatgagtattccctgaaaaagaagttaaatctatttaatcaaaaaatacataaaagtgtaatgtattatttttatactaaataatgctacaatggtctgtggtgggcatacactattaagtgaacttggaaaatgattttggaaagcagaggataatttttttcttgtttttaattgtcaacaaagcagagatatgcattacagacttctgaaacatgagcatcaagtgcagatattaataaaattttaaataccattaaaaaactgtatcagattcataaaataaaaatagtttattctaagagatgaagtaagttcaatcctttaattcactcatctgctcgttggacagcaatctaagtacaccctggaattacagttttcaattttctctttttagtcatatatgtagttattagggcatcacaaagaagaagcacatacacctttcatctatcatcaaagaaggcacaattgcatgtatgtctattaaagcaacttatttattcatgaattcatgtgtgtattccttcgccagatgaacatatagccctgagatgcacattgtactagaacaacttttaaatgaattttaataaataaaataaactcctcatgtgattgtcagactttccattctcccttgatacctaacatagcccagcactttccagatcccagaacataaattgacagactcaccaatgggcccagagcacaacccttggccgtgcatgcttggactctgaaggtgtgtaagctcccaggatcaaatccacaggcatggcagctgagttctgaagaattgtgaatcagtgtatcatccagatataagccataagctgtgatcacacctggaaagataataatcaccttttagtgtggctccaaggcagcagggagtaactaggagggcaagcacctcctggtgtgcttgcctggtgtccccaatcagccaccctgctctgaataccctttctgttctaaacaacacccaccctgctctaaatggtgcctcttctcaaggtatacagtgcgctttactttaaacaccaccgtgttcggctccttagcacagacagagtggcagaatcgaacagcctagaagtaaaagccttcttgcttgaggctacatcaagtgctatcatttatgtcccaggacaaaaaagaggaagtgggcacattcatccttgtgtttttatgtattctaaaattgtccttagtagattccttggggacattatttgctatggcattaccctttgctcaggatctatctgtcacacatccttgcctcttaaccctttcctcacagcctacctaaagcaggacgttgtatcacccctcctttacaagagaaggaagcaagggatgaagttgatgtgagttgcacaaggtcacagggcaggtaagcgcttgagttggggtttgtatctaagtgacttaactgtattccctcttccattaactcatccatgagctagcgaaaccctgttcttcctgtcacactatgttcactgggtgagagaaccctctaacaggccagttttgatgatcagctgagagtctatttcagaaggaaagccatgcaggttttcatacaattagaaataggagtggccatcaaatgtaaggactctacttattcaagcaaagtattttcatgaaaaggaacaggagagtcagcataatcaggctcattagaaatatcaactccccaaaacttacttagcattgcaacatgggaaacaaaagtctgactgtgttaaatcagaactgctatcaaaatgagattaatcttcaaaagtcctccctgagtctaccctccaggaatcactttaagtgtcccatgaccatgtgaccagtcagatgcttcaccatagcctacaatacagcttatcgcagcttttagccattcatcccactgtggtgttactacaccatgtttaattgcctgttttcccccaacagaccgtaggatccctcaggaaaccatgtttcttcctcatctgtgtatttccatagctaagcaccatgcctcaaacctggaaggaacgcaatgaatatggacacggtaaatacatccacactcgcataggaaaacagtcagcatctaatacagagtaataattcacaacccttgcaggaagagctacttccacacctgaaaagacagtgaggaaaacactgttaaagaagagctcaaagagcagacttcaaagaagaagcccagaaaagccaagggcagcaaggaagtcaatgaaagctgtttccccggacctggaaattgaggtatatggccagagagatttggtaaatatccctagagtagacccaaccttcagccactgacaataatgttactggtggagctacaataccagggcttctttagtatatctttgtcctgggagggaattagccccctccagacctgctcacggcagtttgccccctactcagttcacaagcacccacattgacctttgtcctgacacactgctggcaagcctctatttgtgtctgtgtatgtgtgtgtgtatgtgtgtatgaatgtatgtgtgtgtgtgtgtatgtgtgtgtgtgtggcacaatgccctgcattcaatccccagcatcaaaacacatcaacagctcaacaaatgaacaattacttatataaaataccctctgccatttatacctagaacattttgtctttcattaaagttatcttttgaccaatgcatccgtttagaatctaagattttttttaggtaagttaatatttttactcagttcttcttatgacccgtttttcctccttgaaggtaactttttacagttgaactctgtgagtttcctcaccttctacgttttgagggacaagtccttattgtcccacctaccctttgtggctccagaataagtatattagcttttcctgtatatgctgtcaggtacagtttgtctctagaacacatggtaactctctctctctctctctccctctctctctctctctctctctctctctctgtgtgtgtgtgtgtgtgtgtgtgtgtgtgtgaacatttgcacactaaagttagactgcaacctcaccactccatggatacaacattagatactgcaggagctgttgttgaaggatggagaagtcaaaagacaagccagaaaattggtgagagggaactggaaagcgacgccatgggcaaatgcttgggaggcccctagtgatcccccaagtgtcactaaattagaggacagattcctgattgaccacaaccacagcttagctctttccaaactgagtcactcaaacccattgtgagacaagggtgagggcttagaatttactcctaaatcttctttaagaaggattaagattttgaagttcatgcctaaggaattccaattattatatccacaatttactttttataaaatatcttacttcccagcatgtcagataaatgagataatgtgcccaggatcctaccacaatagaaaatctctgttctgtagttatttaagaaaggggaatgttagtttgagtattttccacttctgttgaaaatcagccatggccccagctcctcttcaagagtgtctgcagtgcacatgggattatctaggaggctgaggtgctaaatgagtgttttccacagtttccaacatgctacaggttttgttgttgttgttgttcttatcactgtgactccatcttactcttctttccgtggttttctgtttatttactggttcttcgctaaccatgcttcccttgacagaggagttcgtgcgtgcttttgtttgtcaagtggcattgcactcctcagtggtccataaggggtcactctagatgcagaggagagtggctacctgcagacccactggtggtggttatgtcaaaggtttccttcaatcaaacccagaaagaatgaagaaatgggatatggaattaagccttataaagcacactttaagaaatctgtaagatttcatgttactttgtgctgtgatcttgttcatcagtagctgtggctggagctgtgtgcaaaccctgatctccacgcccaggacagagaatagcacagtggtcttgatcgctcccttccaaatgtgacaatataaacaagaaaacagatgaggtattctgagtgtagacgtagtgtgttgaagaaaaaccctgtggaacagaagggaaatccaaagttgacaggcaggaggcaggaattagccagtctggggtgggtgaaagaagaaaacttctctgagaaagtgacctcttggccacacctcacacctgaaactatgtcatcaagaggccaagaacctcagaggcagttatttgactataactaacagagactccaaaataacaagcagaaaaaaattccctaaaacatcagcaggttatcaaatgcaaccaccacagaacaacttaacagtctgtctccagatccactggatgaggctccttctgtgtctatgacacagatggcatcaaaacaaagtttaacgaagtggaaattccaaacttttatttactgtttaccgttcctctaatgaaagaaagctgatgcaatgtattcccacggctcccattgtttatcccctaaagaggcgaaaggttgatgaaatgggatttcagaactagtcaaactttcagcggtaagcaacttcaatgagcagctgaggtaattttagctaagagatgactggtagaggtgtgagtgaggccgaaggagggagaggaatagtaaagccactctttccctgtaatgaccgtgactcctggcagcccattctaaccatagccactgggccaacaaacacacctctgtccacaagaggaaggattacatcagggtctggaacttggaagatgatcgggcattacaagaaacattactggacagagttcagcatctggtagagaaatagagcctgggcattcagagcccagcaggatgggaggcagtcagtaagtctgagactccatcccctcactcccctcctttgttgtcgacacacaggtaagatgggggtgttgtagagaggacaagtgcgtgaatatttcggcgaggtttgcccccactttacagagagaatacctcacctgagacgaagtttcaaaacacggtgcatatcttagcgctaaaaggtggcttggatgtgtgttggccttaacacattcacatctcataggacacacagcatcccatgtcacagaagctgcatatctacttgtcccacagccttgaaggcctggggaagagcgaagaaggtggccactgagcggcaaaggaatagcaagcacactgctctcactttcatcagattctctgtgacatttcttgcttaatcttctgggtaataatcagcaagataaccacaaaactgtgttattgtgtgtgtgtgtgtgtgtgtgtgtgtgtgtgtatctatgtgtgcatgaatacacacacacatgcacacataaagtgaactgagttatttaatccacttccatacactctgttcttcagtgaaaactggaaaaatgaatgcttaattttcattggctggctaatgtaaaagctctttggagtttgtcatctgttcccataatgatagaatttttaaggtgtttaatttagcaggcaagctgaatcataactgcctgtaaagcatacccaccagggtatatatcttcatgcctcttcatcatgccatgtcaaattgtatttcctaaggtgctcaataggttgtcatatgtaagcaaggaaattcaatacaatacaatgtaaatttaatacaaggtatctctatttacactgaagaattatgtttactgtaagaattaaacaacaatgtgtccatgtgccataaaaatagcatgcaccgtgaatattgatgccccaaacctatttgtttgttttgttgtcagtgaggcttggcaataagaatatcaactgcacgctgcccccgaggtccagatgctgattgagtgtggcagatatctccctgtgtgaatacttgatccttcaattaaaaaggaagagagagagagaagctcccacactgtataagaatgccttagtaccattataatggctcacctaaaaatggcatcgacagaatctaaaaaaggctgtgcttgggaaattctacctgacaaattgatgggaggtgtttcataaaagttaaccaaggtttgttccaaactgtcaagcagtttccctaagtggctcactgaattctagaatccattgcacctgttaaaactgagcactaacagaaagaaaacagaattatacttgattatggaatatagttttttcataatgaaacgttatgaaaatacacaattatttctttaataccaatgaaaccacaacagattggcaagcatttgaatttcacccttaagaaattaatagcggatgagtagaaatttcccttttattttcatatgtctggttggaacctgatgctaaggacaattctgtaaaaaacagagatagactaagaaataaaatgacaaatttttgccattcttggacttttttcaaaccttatccctccttaattagctgtcttgacttgagtaattaaattgtttaattcttactaatccaattttctacatttgtacatggggatattgtaaatttcatgggctaattttgggaattaaagtactatcatagttagctttaactgtcaacctgacatagtatggagtcacccaaacaagagggtctcaaccgagggattgtcctgattggaatggcccatggccatgtcttgggagtacatgttttgactgttaaatgatgtataagagctcagcccactgtgagtgacaccattccctaggtaggtagtcttgggctgcataagaaaagtaagtatacataagcatgggcccagtgagctttcctccacagtttctgcttcaagatcctgttggagctcccgatccaattctcagttatggaccctggtggggaggtataagctgagcaaactcccttttcccccaagttattttggagagcatttttatcacagcaacagaaaggaaacttattcaagagcctagtaagtagttatggattgtagccaatctcattactgttagtaaaggtgggtaggaaatcaaaccttccttctacccctgaaccaaagactgtgttcacctgtgccctagtgcgtctattgaacacttcagttctacagcagcctccacccatggtaaccggagcagtgtgtatggaaggtcaatacgcaagcactttccctgccacactgatgaaagaatgtatttgtacagttagatgatcttccaataacactgactgtcttgatagcagtctgtataagtcttcagaaacaggtgcaggccctaggttcttgcttccatgattacagcgtgctgatgtgtgttttggttagttttaactgtctacctggcacaatcttgatctcctgtgaagagaacctcattgaggagttgtgtagattgtgttggcctgtgcgcatgtctatgtgtgggggcgttcttaactgggtaaactgacatgggaagatctgccatgaatgtgggtgaccctatttaagggtcaaggcctggactgaaagaaaaggagagagtgagctgcatctatcaggtgccaccctatcattctctctctgcccctgacttgcatagaatttgatgcttcaagttctctttgactttcctgcaagagaaatcagagggtgcaatgatgtcaagagtgatcatgggcaaaagccaaggtttggggctggtacatgcgggtgggtgggtgtcagttatgaggagtgtgacatgaaagagaaagccagacttgaggatgagagatggaatcaggataaagagctaactgggacgtgctgagtttcagatgggatggagactttgagggttgcaacagggacctgatggtttgttttcattgctaacatgatgggatctggagtcacctaaaagagaagccacagggcctgtgtggtcttatgtagatcagtgtagtctctgggcatggcagtgattggggtaactgaggagggaagaatcaccccaatcatgggtggcatcatcccatgggtagataaaaagagaaacagagatgagcacagccattcatctgcaggcacctcaagtttccattgtgtgactgttagctgcctgaagaactgttcccttgcactgtgacccagaataaagccttctttccacaagttgccttcatatcgcagttgtatcatgctgctataaggacagatataaccaacacagtgtcccaagaggaatgtcatctgggcagctggttcccatttactagcatcctcatcatcatttatcaaaccccctgggaatcaaattcttaaatccactttaccaatagggtttcagtaattaggcaaaacagcactcaacatcacttgaaggtgtttccttaccagcatggggcaaagcctatagaggcaactttcagaagatgtaattccataaactaaattttggacaccaacaagaggcatgctattttgttcagttttctacaggatactaatggaaggatcattatttatttatttatttatttatttatttatttatttatttttgtcagctggtgggagtgttagacaggtaattaaataaccttaagtccagatcaactgatgtaagtggaaggcactgagaagaccatgtagtcaagagcatgggaaggcttaaactcaaagaaggtcagtatggcttcatagattgctgtggctaacctgtgaggatgagctgggtttctacaggaaaaggcagggagacaaatggaagaagtgttaacctccatgtgaggaattcagttcccagaataaaacagtaatgttacctcagaaactcctcgtgtagtgtggctctatattaagccataaaaatgaagatatggctagccaggcagtggtggcacacacctttaacaccagcattgtggagggaggaagaggcaggtaggtctctgtgagttcaaggccagcctggtctgcaaagcaagttccagtatagtcagggctatacagagaaaccctgtctccaaaaaaccaaaataataataataataataataataataataataataataatgatgatgataacaatgatgataatgaagatactttataatttagaggccatctgaccaccagactgcaagatatagagtttggttttcaggtgtgtaaaggaaatgcaggacttttggaaacggacagtggcaggatggtcaagatggtttgggggaagtggattatgcttttccacacacccaacaacagaaatgaaacaatggcaaatttggggaaagggcaggagaatcatgagaagtagtcctttaacggctcttagaagatttattttaattgtgtgcttatatctctctgtgtacatttctctctgtctctgtctctgtctctatgtctctgtctctctcctctctctctctctctctctctctctctctctctctctctctctctctctctctctctctctctgtgtgtgtgtgtgtgtgtgtgtgtgtgtgtgtctgaatgtgcctttcagtaaatgttcctttggagggcagaggagggagtcgtaacccccagaggtggatttaaaggtggttgtgagcagccagttctggggctgagaaatggtcttgggtcctctataagagtagtacatgatcctttccactgagcaatctctacagcccctttactccaccatgaaagttcagaaaatgctattttaattaaacacattagactatcataaaagtgttagcaaaatatcccttacttattgcttattgcatatatgtaaaaatgactttgcaaacacacaactttaataagcaaagatcctggaaatgagagaaggatttctctagacaagcaaggagcacaggatgggaaaagtctgagtgacaactaccacctgggaagaaggcagaattctatgcaaaccaggttagcagccatccaatcagaacaaatcagtagcatttctctgacacctatggactagacagatttcgttgtggagtcagtagtgtgacaagatttttggcttcttaatatagtgtcctatagatgtggttcatttttattaagcaagttgtaaccatacaaaggagtagtttcaatggcagagaaaaatcagtcactctaattaccagaactccccccattacctcaaatacagctcttggatttgccacaagtttaatttaaaaggagatagaataattcatggtaaacatgaaacaatctagtaaaactataaggtttttgttttcttttagtctttctggttacacttacagaggccatttcagttttcaacaatagttatttaaaacagtttctggaatattaaagcattttgatatttgtcgcaaaggaggggcatggtttgctatgctgttccttcttccagggttaaataagaattctgtgtttaacaaatcttaaagatatttctaataactgattatataagtcagcatcttgtgtcttaaaaggcctattaaaatgtctttataatgaggctcggttttcatgttgtttctaaacagcacaaggacacacacatcatgaaggaatacaatgcagcttgagtgaagtataaatgtatgcatgtttaatgcatgcattgcttaaatctctgcgttgaaatatttataaacagcatcctgaggaatatgagttccaagtgagttcttttaaaataaacttattaactaaaaagcatctgaaacactgtgtacatgaacttcccacctctttacttctccaaggaagaactaatggctgctgcaagcagaaagtcactaaagacaatgtcactctcaaggctacattcacccagagtttccatttgtccctgtcccctctcctagcacacactaaacaatggcatgcagtacataagagctatcaagagggagcacttgtgagccaccaaaactgcatgtcaacctaaaaagcttactctccctaactacgaagatcctatcccaggtattttatgtgctaaaatgatcattaaaaattaagtaccacatataagctgccatttagaatattaatttacttttgctaatcatgtttttaacttcaggctaaaagagttcactcaccattcggatactcaggctcagtccaggagatgttaaaggagtctggtgagtaggaatgggcttggggggctggcacaccttctggaactgtctcctctgttagggcctggctgggttcactcatggcacagccaccaccggtgcatgcctaagccaggacagaggaaaacactttatcctgaccctcaaatttagaagaacagtgaagagagagaattcagagcagaagctctgggcactgctaaaataatattcctttcattccccacaaataggtttgcttccatgctgaagtatggcatttaattggattactttttaggacacaagtattcatctccagtaaggacaaactagccagggcacatgaaaatgaacaaccagcctaagttacagcctcgagatgcaggatgcatattgcctaggtgggcagctctgctggtgaggttagcactatgcagagggtctcagggaaacacactcatgtgcatgtacacacacacacacacacacacacacacacacacacacacagagagagagagagagagagagagagacagagacagagacagagacagagacagagacagacagatacacagacagacagagagaacacaccacttgaggaaaaaatatcagggacttaagaattctttaggaaaacagcctttatttatctgttttttatttttggttatggggtgaagaatagaagccaatcatggcattcactacagtgtaacctgcacattcatatttaaatagcatgagaaatcaagtacagcaacattcctaagtcaatcaaaagacatggatcccttaaaacatgggtgaggaactcaaagtgatccctaatatagcatctaactccagaaatagaacacagacattcaagacattgaattttcccataatgaactgtaaatgctttcaaaggtactactgagcaatcatttccttaggaaatggagacatacacacagggctattgactcattagcaaatacaagcaattgcaattttagaaaacgaagatagtacttaagtttcccttagaactagtcctccaagtctcaactgcaatggagacaacaaaattcaaaaattgttcacaaacgaatttcaacccaggtcaagcctgacaggaagcaaatgtgaaaatgtaaccatgcaataactggacagctttttagtgcatttcatggaagcttgagttacaagtcccattgttttcagtgatgtctattggcctgtggggcttggtcagctactctctctgttgcttaaggcactggggagtctgttccctcaggacagaagaagcaggagactagtcagaaatctctcatcagagcatggaactgtttcctacattgttacaactggccacagagttttcattgagataataaaggacaatggatagccaaccacctatagagatgtttgcttcctcatataagaacactgtggtagggctgggaagaaagcacagttagaaaatcgtttacacaaaatccacacacaatctcaggatcccacagaaaacagctacttgtggaagctcaagcttgtaaccccagtgctgcggagcaagagatgagaggctccctgagttctgctgaccagacagctcagcctcatctgagaactcgggacgagtggaagaacccacttcaaaactatccaggtggccctggtgacacggtttaatgagtaaagtaaagcagctgtgtcacggacataagaacccgagtttgtgtccccagacaagcatggcaaatttcttctgtatcccaggtgctggggttagaggagcagacggatcaccagaactcactggccagccattgtgaggaaaatgtaagttccaggttcagtcaaagaccctgcctcaaaaaatatggtggaaagcacacacccgtaccacatgcccccccaccacatgcacacacataaaacacatatgcatgaaacacacgatggggtggggataagaacataaacagataacaaggtggatatacatatgtttgtatgtatgtattttggtatacatattcacgtatacctacctatacagatgaggggggtgtagagaaagagagaagacaggagtggcccgtgtctatatattataacgcctcatgagcttagaatgttccagatgggtgccatcatcacccagggacacaatcgcattgaataggggcctgagtaaactctgggtttctctcaatttttggatgcagaacgtgcatatacgtgtaaaagaaaaactctcgtcttctcgaggatggagtttttaccaaacaaccagaaagagctagccacgtggccaacccctgatgtaaggcttcaggaaaggccaccactgacccaagaaccagctacggaacatttaaaaacagaaacggaaaacatgtgcgcacaatctacacactacccatctcagaacatatccagaagcagggccgtgtgagatacctgagctggcgaagcacacattgtcagaggaacaccccattgctcaaagagagggaatgtgcttgtgctcacttatattttcagacccccccccttggattgaaacattgtggcagagtagtcccgttaatctgatcacacacagggtttaattctgactgttgcgattttttttttctcattttattcacgtttgcagcattcccatgttacacctctcaaagaaatactgtgctttgtgaaacaacactgttgcatttctttaactagaatgcaaactaaaattgactttgttttgagaattttatgatgttttctaaaataaatgtaatatcctctttgggggagcttttccgtggacagtgtcatctgaaatctgcaaactggtagcctgacaaagaagcaccttgggaattcctgagattatctttctggccagggagacagggtgtaaggagttgttcaaacaacagaaatatctgcaactttatctcagctttggcatttagagggatcttcttaaactcgaatctgattgggctaatgctgattgccattctgacttaggaaaataaataactggattgattgaagatgtcatttacagcaccgacaccgagaggactgtgaaagcctgcaaggtggctagggaagcagctctgacctgtttacctgtttcctacagcttttagttaattacagacacatgaaaacaaagtctacaatgccgtgttgttgtctccaatcggtgggtcacttctgatctaaagaggctttatttggtttgataaaatatatgtgtaatctaattatggtggcaattttttaaataatgaccattaggagctaaaatctagcattctctttttcagtattttgtttgcagattaacaggatccaggagtatgaaagacggcaggggtattttaaggtatgaagaaaaacaacaactacaacaataccaacaacaaaaaccaaacctagcaattgctttatccctatcaatctcttcctgagaagttaaggttggggcttcaggaaatagctcatctggtaaagtgcccactgtgctagcaagaggacctgagttcagatctccagtgtccacggagaaagacagcttggtggtatgcatatgtaaccctagtgctttgggggaggagaccagaggatccctggagcttgctgcccagacagcctaggcaatcagtgagctctgagctcatccacagagacagattcagtttcaaaaggaagagtcaagagtgagagaagacccttgacattgactattggcttccttgtgcatgtgcacacacctactcttcctccagtacacacacacacacacacacacacacacacacacacacacacacacacagagacacacactttgagctcacagtttccgttgacattcactgagtgacaaatggctagtactgctgtgagcattttcaaatactaacgttgacccctgcctatagttgaacgttttcaaacacgaaccttgacccctgcattttccataattgttaactccctgcatttattgggaaccattaagacctattaaacttcaaaatgaacaccaccatattagaccacaaagaccatgggctgtggaagcacacccccacccccagaacgctgactttccaaaggatactatgtagtaatatttaaagtctcagactgattatggctgcatatggtggtgattcactcattcttgcacggactgtttttgtagctccttggctccagcaggtacagccagtcctttgcacaattcggaagacgcaacttctctgtttcagaggcttctaacccagtctgacgcagaaattaaatgagtgacacagagtggctttactgtcccatgcctggtggcatcttcatctgcttcaaagtcctctcagggcttggctgtcagagagctttgtttctcagtacttagccaacacactaagacaatccataaaagccactatactttgctgaacacctgctctccactacttatctagtgaccttgagagctggttatcatattgaaactgtgaaatacacaataatccctcaattaaccaggatgaacctaaaatgccacggttcatttagtttactgtttaactgagttacttaaaaaaaaaaaaaagcaaaaaaaaaaaaaaaaagcaaaagaaaaaagaaaactttcacaggaatacgtcctgaaaatgcattgggatattttctaccctgataaatatagtggaattaaaaggaatgtgagaaagtatgcctccttaataacctttagggcacaaggacatccatgtcattatgacctccgacaccgatgctactcaagacctgacacacattgtaattatttgggtttacctttttagcattacagaattttagggctctcaaaaagacattaaaaaccattagttcaatgccctaattttagtcctgaaaaaaaatgaaagttgatgtgccttagtacacttgccttgggttacacagtagtcaaatctgaattaaaactcaagggaacagaccatgaagttagttgtacttagttttcaagctataacaaaattataaagtatgggatattgaaatggattttgagtgactgcacagtacatcctaaaaattgccttaggaacagaacatttttatgccacttacctcctgataaaaccccaaatttcaacaatttctgtttaatcttggttgcttccaagcaattgagactgtttatggttttcatgcatacagctattttgaaaacagcgcggacttcactgttagcttttgaaaattgagttcagttcgtacacttcttagcttttcagtaacatggctataagtaacctgaactgtcatttcccaaatccacaagctgtgctgagcagagagacgcgtggggctcacattgtctgcctgcccttgttttgtgctgtcaagtcagacacttaacagcagttggatgcggtttattttctcatggtataatattttgagcattcacgagcatgttaagtaaaatgaatgcgtacacagtgtctacataaatgtaaatttattcataatcaagagcagaatattttctatggcatttatcaaagcaaataccctcatataggtattgctataaaatgaagagggtgtttaaaacaaatagggacaacctcatgtttatattcagttattttcagatgtgctattaaacttaaaaaaagattatatttcatcaaaaagcaaaaggaaatgggagtacaaattccacaacaatatcaaggtcttttaaaagaccttcatatgcagaagtgccagttagcattaaaaacatgccaccatcttcccaaggaagcctctttacactgttgattcttggtttcatcaagtgactatttttttctgagacagaagtttaatacaaatcacagcacaataacaatcaagaatatcttggggtcatttgaagcttcatttaaaaatacaagatctgaattcatactgtgaggagtttttcaaatgaatacaagcaccacaggcaaccaccttattaatctaagtattttgggaaaagctctcgacaattagaatgtcctacaataatgataaaaaattcgttctgagcatctcaacatagatctaggaaaatccagtaactcagatggctattttctccttcaaataacaaactaaacatgcaggagatcaaccaaagacatcaccttcagattgtggagggaattttcagtataaaccctaatggatgaagctttttgatattttgtttgtttgattttggaaggaaggaatattggatgaagggaaatgacagaagctaagttgacttactcccagcttgatgaggtacaggcacccaggagaaaggtgccggagcgtgtaagcctggtcatttttggtgttgttgtagataacattccacactgaggagttacgtgtaggattcaaagaatataatatatagtgctccagaattccatttagttgccttggttgtttccacctgggattcagcaaaagaaacagcatgtcatccattcatgtataagcagagacgtataggattgttcaagagtcatataaacttttatgcatcctgctgcaagaaaacctacatggaaagatcaaaagtgattgtctctaaaaccatacacacagttataaaatgcctagtctaagaatcttaaggaaatgtgacatagcccttgccttctaattattttatttctgtctgtggtcatctctctctctctctctctctctctctctctctctctctctctctctctgtgtgtgtgtgtgcgtgtgtgtgtgcgcgcgcgtgcagtgacacacacatatagagaccagaggaagatacccagttcctgttccatcactctgtgccttactccctctacacaagatctctcgttgaaccagaagctagactagctgaccttcttgcctctcatcagtgttagggtacaggcgtgtgtgaccataccaagttttttatgtaggttctggggatttgagctcaggtcttcatgactgtgcagtaagtgttcctactgagccatctttctaacccctggttatgtataatttaaattagttaacaatatacaaatgtgcatgattctttttaatcttaggaggcatacagtatctgaagacttccaagagactcgagaaaaagagtgacaaagcaatgctgaaaggcccaatacccaatggagaatgagcaggtagtcgtggaatacagagagtgaaacctgcaagagccgaggcaacaggcagggcttcttggcactgtaaggttgtacatccagatggggatttggataggtagactgaagaatgctggtcatgtcagatgagggttacagggtaaaaggggatgagaatgcctcgtttcagaacagacagaagacagctcagctgagaaatactcagagaagtggggaatcttggagaataaatagcatagcttgtcttaaggcaactgaggcccagcatgagagcttaggaacctgaacaaggacaacagcagtgtgagtggtgatgctttgcagcttgaatgaatgccataatttattcagtgtcaacatttcgttcacagatgagaaaactgggagtaagaaataaaaatgaacaagcatgaactggctctaagagaaatctattaaatttaactgagctccttagacctcatatactgagaaataaacaaaagacactaaaatcaaagaaaatctaaacatttatgttatactcatcttggacttgaactacagggaaatgagactaagtgttcccatacaagatctgggtttgcttcctggcacccacatggaggctcacaaccctgggcaactctaatttgggggtatctgatgatcttaaagcctccttgggcatcaggcatatatatggtgcatacaaataaacatacacacacacacacacacacacacacacacacacacacacacacacacacacgggcaaacactcgcacatataaaataaaataaatcttaaaaagaagttatatatgcacacacacacacacaggggcaaacactcacacatataaaatgaaataaatcttaaaaagaagttatatatgcacatacacacacacacacacacacacacacacacacacacacacacacacacactattccagccattacaaattattgcaaaatatcctccacctataaagaacttgacagtggataagtaggtggtcatttttcttttactgacaattgcacagaagttgcatacacatttagcttggagtgattgcctagagacaaaatggaaattaagttgacaagtgataatcagaggttcctagaaccattggcctaatcatttctatgcatttaatcacaatacaattagtctgatgtcacaagcccttctgaatgaactctttgggattcttatgtgaaccagcaaatgcaagacatatgcgctctacttactggatgtgtatggttctagaatccacaacagccaaggttggaggatctacttgttctggaggcagctgtgctgtctgcaggatgactcgagagctgtttgtgcatcccacatatgtgcatgcaccaagtataaactcgtaggctgtgaacacccctaagtctgggggaaggagagaaacaagaatttattctccatactacatttctcaggagagctcactaaccgcctacattctgatgtttaggaattgttaaaataaagcttagcataagaatcagtaattatgaaaagcagtagaaataaaatatatttctctcttaaatggcatgactgcgttgaaatgacccttgtcagtcacaatctccacctgacttttcattgtaacaatgttttcttgaatgtctatgatcaggtaaatcactttcagggtttagtcttagttcaaagactctggtaaaaataaatgagatatttaaattattttgaagacaacagtgtgtgcttttgaaatgcaaatatatagccgataacaatgtctttgaaattcccttttcccatctagctaaccaataattatttgaacttcagatcattcaagttgagcatgtaggtatgcttcacttgtaagatgtcactgacaattcccaatatcaccttggacagacagcagctatcatctgctcacctgacccccataccactttgtggagaccccaacatgacactcacagcactgcagccatattgtttccttagtatctaaaaccatgtctgatatattagaggttttgaatatgtagaactgaatcaataaatacagaattaatgaaggagatgacaacacagttgagctaggtatgaaaggctgtgtggtaccctaggcaatagataatgtttccttcccacaaatttccttgttatttcacacctatttactttcctggtgtataccatatccctaatgagaatacactgatctataattccctaattccattcttaaatgcccaaattcttcacatataaaaaaatcagtaatctaaattaattttgatcaagtttagcaaacttcaaatataatttgtactttctcagtattaaaaatagtaattttgagaaacatctttgaaatatgtcatgatttaagtaacacatattcttaaatctcattaaccttgaaccattacaatttcatgtgtaaaagattaatgaaatgcaacctaattcaggcaaatagcttttgcattatactgatagcaaaagtaaactaggaaaggagtgctgattttcatgcaaaatacaatcaattggttaaacatgtaggtcaccagaagaaaggcaatctagtaatttcatagcaagcgttgccttagaacaaaaggaggtcaccacgatgacacttggcatgtttttgaccaaacctagcttctttacagcttctatatggtaaatatcttaaggtaccaggctgacatgagatatccctctacaatgttatcagaggaacacagcaaggacacacatggacccacttggaatggttcagttctgatggatgacatgtgtacgagtaagaattggagagccctcctttgaacaagcattgtacaaaacttatgtcctagtcagggctctgattgctgtgatgaaacagcatgaccaaaagcaactggaggcagaaagtgtttatttggttcacacttccacatcgttgttcaccattaaagaattccagactgcacaacttacaaaaaagcctcttgagcatgggtgaaaccatgagaagagtgttgctaggaatcataaccatagaggggtatatcttactctgagtgtgtgtgtgtgtgtgtgagtgtgtgtgtgtgtgtgtgtgagagagagagagagagcatgtgagtgtgtgtgtgtgtgtgtgtgaatgtgtgcgtgtgcatgtgtgtgtgtgaatgtgtgtgtgtgtgtgtgtgagagagagagagagagagagagagagagagagagagagagagagagagagagcatgtgagtgtgtgggtgggtaggcacacaattggcatgaccttgtggaggtggatattgactccaagtatcattctcaattgctatctttatattattctattttatttcttagcaggggcctctggatggcctgtcactttacatgcccccctcacccctataaattgctgcttttaggtgttttgttaccgccagaagaaaagtacactatacatgtgatgtgagaaaaggtcactcaaagaacgactcctgcctgcagggccactctgccagagcgctcacgaggacccagtctcctttacactctgcactctgcctctgttgcccctggttctcaaggccttggttaacttcccccttctcttctctcctgccaggttctaattccttatattctcagggaaggggcttcattctatgtcatttcaagagtaaggatggcagagaacttaaaggagctcccaacgtggccagaggtcatggtccatgtgcccaaatatgagtgactcttaactctatctcagtcacatcagaatatctcatttatctgcagatgagactggctactgccattcttcactcagtaattactggagtttccttttctattccattcagattggtaagatagggacgtggctatttagtttgcatttgatgaagaagctgccccattcaggaatgacaccatctcatatatgtggccattacacctggaactttgctgtctcagctgttgccccagtgaattattaagttatgtctgcaccatggattccccaaaatgtaaaatgctccattttcctgtatactataatcccatgccttgaatgggactttgatgattaattcccaaagtcacctatgatattcccacagataggaacagtttcctgtagaggcacaggggctctttcatttgtgtgtttggattctattgtgaccagtagtcttcttctttgggttgggaagcatccatttctatgactgttaggactggagatcgaggtgaggaagtgactacacttagagtcacacttggcacagtgagtatgactcgtgtcttaggctgtgttctattgctgtgaggagataccatgaccactgcaacttttataaaaataaagcatttaattggtgctttccaatagtttctgaggtttagtccattatcatcatgggaggaaacatggtggcatgcagtcagacatggtgctggagaagttattgaaagttctacatcccaggtctacaggcaacaggaagagcaagccactgggcctggcttgggcttttcaaacttcaaaggccatcccaagtgacacacttcctcccacaaggccacatctcctaatccaatagtgctactccccagtgagcaggaattcaaatcaatgagcctcctgggccattgttatccaacgatcacaacacttgaatcgggactgaaacagaagcacccaactgtgtcaaatcctccagtcagagttacaattcacctcaactactctgcatttgtaagtactatcagtttgtggatgatcaaggcattgtgtattacaacaaacgtggcttaagaatgctcacattgccaggtgtggtagttcataccatagtcccagtacttggaaggttgagacaaaaagattgttgcaagtttaaagctagcctgggctacatgatggggccttgtctcaaaactgacaagtaaaataaaagtaaattacacaaacacacatacacacatacacacacacacacacacacacacacacacacacacagagagagagagagagagagagagagagagagagagagagagaatcaaaacccttcaaaatattggtgctaaataatatggaaagtcgtataaaacttgaaagagtagtaagagtaattagggccagggtggtttgatagtcaatggtcatcttactgaggtgacattttaaacagacacctgaagccagtggatatggaaattgtagggattctggagagggcacattacaggagagggtacagccagagccttaactcatgaaggagtaagagaaaggagttaaagagagagaaccttcaagggttttgttatcaaggaaactagagaattgagacaagagacacattttaggaaagggtaggtaaagggatccaaatacctgaatgagagacaggaaatagtaatgaatgaatgaaagccaagaattactggttatctacagccttgcttgttagaaaatgtgacggaattacatgggaagagttgaggggacagaaacaagaaatcctggtaacaggaaagagactatgtgggtggcgtgctgttagggatacagggacctgagagctgtatcatcagccaagaattctcttaaacatccctccacacacacaaagtcctgaactgtcctcttttttttttttttttttttttttttttttttttttttttttttccgagacagggtttctctgtatagctttggagcctatcctggcactcgctctggtgaccagggtggccttgaactcacagagatctgtctgcctttgcatcctgagtgctgtgattaaaggcctgggccaccaatgcccagcaattgtcctgttaatgttgttaaaatgaaatctaatactggccatggagatagtaattgacttaaggattctaagcttcacaggccttcactcatcccctagacagagtgctgctgctctcacatcacgagctctcacttggagagctttgagagggttgttctcgatgcatgaagtccatttcctctgttgctggatgacctttgcttgtcctcctttgagtagtctccttgatagtcagacagctcaccaccatccatggcttccctttttcctggtttgtttcctttttataattacccaaacaagtcgaattatattaccttctatcccaacctcctatccctttcaagagaatggaagagatatttgctgtcacgctgaccatattatctcatgactggagtgacgctcaatgaaaatacttttcttttgttgaataatgagtggacaagaccagagagagacctcaatgccccttacatgagctgatatattttttagaaatacagtaacatctaaaaatctcaaagaatctatctaacacaactgtcaaccaatggagacctataattataagctagaggaaacctgtctttaaaaataacaagacaaagcagtgcatcaaacacaacttccaagcactaatgcttcaagacaacaacaaatcaatcaatcaacaaacaaataaacaaaaaacaagatacagagcagatggacatgtaaaccattaagagtttcagaacaagggtatgcaggtaacttatactaggggtagttacatatatacatacatatcaattttgcatgatacacaatatgatatagatagaaaatggctgtagtatattaatatcaatttattactcaggagaatttatgtgcagaacctagttagcaatgccctattccacctccgatgtcacacagcccctttcctcaatgacttcagcattggctcagctttcttttcaatcttaatctcactcttggcaactttaacatcctcaataatgactcatccctgaatttggcttcacttaacttcctcaagtgcaatgcccttcacctcgacttcatttattcaccatccagcttagttccactcattacttcatcatctttagaaccatgtccaagattcgaaatctaaaatctacccggtgcaggtttctgcccacccctttaacacatcacactgatgtaatcactccttcaccaacagtgtctactttttcaagcttatcttatttccagaatattcaccacagttgcctttccctcctgtggccattgattacctgatataaagtcatattctcccagtacttgccaacctcagtgctgtggtttgaatatgaaagggctcccagaggccatgcgtttgaatacttggctcctggctaataatggcatggctttggaaggcgatggaccttccgaggacagagttttactgggagaactgggagactagaggcgagccttgcgactttacttgcacttgaacagtgccccaacctcctgcattttcactggctcctgtgccctctgaggaaataagggtcagggagtatgggtcaatagtctgggagtcccaggtttttggttccctcaaggagtccttggggcctaggcctatctgagggaggttctcccagtgggcagagctaaaactaatatcagggccgtgtcatccctgagccacctactctctgtttctgctttcttaccgtggacataatgaaaccagttgtctggtgatcaccgcaccctgccttcatcactattaaggactgaaccctttcttaaactgtagatgaaaataaatatgttacttcttgaattggttttgtgggtaatttattaataataaattaataataattgatacagaaactattaaagttactaatatggaaagtgggaccagggagtggggcctaaccacacagttcttcataagctttgggacatgtttgtgagaggaaagaggaagaatttagaacttcaaggttgaaaggccctagaaagctgtatgtggagctgaaagtgccatcctggtgggagttcacaatgataatatcaggagaaatgtggagtcccgccttattaagattcagatgggaacaagggctgcatcagaatctggctgtactctgtccatactccaagagcccgactaaggtcgagttataaagtaatggactgatttttccagtggagcaatgttccagacagaacagcatccatgctgtgctacagtgactgctccctgctcttacctgggtctacggtgacagtaccaattgacacaggcagatgtaagaaccgcagaatcgaagatgggatggaagaggggtacagttgtgattatggttcagggaaagaaggtgtagctgttagaatgactaccataattaaggagaaaactcacactgtacattgagacagtagatgggattctctaaggaaagatcccaccagctgaaggctccaacttgtgaaaacacaaattcatttgaaaggagccagcctgaacttggaatgccaaagaagcaatttctcacctgaaaacagccgaggaagtatttcccccaaggtcaggacagaggccactgaaactgtggtccatgggcacaggctgcatctcaagctgcctttagagttctgtcagcataagccaggtggtactgattttgcaggcatgagagatgtatgagggagggattcacgggagcttgtgccaaggttccagaaagcatccgaggtggggcaatatgaggcacagtcagattccctggaagacggctctgagaggcccctgcacggagctgggacagtgaagcctaagctgcaatggagatctcagagttttagagatggcaggggcatgggatgtcccttggggaaatctgaaggcagtccaaaagaggtcacatgtattacagacaaaagagctgtaggagtaaggctctccaaggccactggggtctagatgattccaccatcagccttggatgatgaatgagcagctgtagggattgttgctcccccacttggggctcgtagttaagagactgccttgggtattggaagatactgtgaactttggacttttcaacaggctttgtttaataccatggagacttttgaggctggagcgaatatgcttctcattatgacatattcatgagcttaaggaagcgctgggaacattgaaatgttgggactggaatgtaaaattccaattttacaaatccccacacattgtttgaatacttggtccccagttgttagatctgttttagaaggttctgaaagctttatgaggtatgatcttttgggataaagtgtatcattagggtagacctaattttcatggactctctgcttcctgactgtggcttcaaggggatgagctgtctcacactcaatgacaccatgctttcctgacatgatggattgtgtctcttatcaaactgtaaggcaagggaaatcaaaccttccccataaggtgcttcatgcgagacgttttatcatagtaacaagaatgcaagtaaacatgtaactccagagtcctcagcaaaacttgctatcccaattctcaactctgatgaatctcaagtcgttaatgtttcttacggcaacaacatggacaagaggcatttcagactggacatgttgagtgtattacaatttttggcccctctatctgaaatgggcctttgggactactcaacaataactgtctcattcccttgtttatctctttctgttttagccattttctccccctctctttacggtttgggcaataatcttgaggcatctaatgggtctaaagttggagttacgatcccccctctgaactcctttgttgtccttctcctgtgagcactggtatcagtgtggaagtcatgtttatccgtggatttttgtcttccttacttccttctcatcccgtccatctcccttatttgattctaaattcttctcaattaagttgtaatttcatatcttaactagaaagctctgtcatctgcaaagcagagagttactggtcagatgcagaaagaacaagggaagttctgtacagtgaccaagggaatagagaggaggttcaacatacagataaaacattttggagaaacagggagtgttcttcaagcactccacttaaagctccatattccctcacctttgaaataagatggaggggaggaaaaagaaacccactgtcagaaaggcaggccatggttctctcttccaacatggagtttcaggtgagggccaagaatcaagcaaaaggaaagggtcatggtgtctgtagacagagcttcaaggaagctaaaagcatttcatgttcccaagcattatgcagaaggggtgcccctacattcatactttcccgtggaggaataggttcctttgatagccaagctccaagttccaatgtggtatgcacgaacatgaatgtaatctttaaagcagaagggggaaggggatgccaaagcaaggagagggttgttgacttctaattatttgagagtgaagtcaggtatgaagccgtgttgcagggagaatcacatgcatgcatagaaagtgggacctgagtgcaagtgcactggcaccccagactgccgtccgtggaagctgcatgctcagctggcaccaagcctacaggatcctatagctgggatttcagagcctatacctaatgggggatgtactactgtatatgtttatcttattgattgttaaataaaatactgtttggccaatgagacagcaagttagacgggactaggagtcaaagaggattctgggaaatgtagtagagaagtggtgatccaggcaggaagtggcatagcaaggagactcatatttaaaggagaaacaggaagtgtccctcttttccccttcactcctgctccagcagcacaatgtgatccacctacaaggagggacgccaataaggcgtccgataagtcttatataatatatagatgtatgataattaagactgagctagcagacgagaatcctagtcgttggccaagcagcattgtacctaatacaagcttttgtgtattcatttgggcctaactcaggcgggcggctggcgtaaagctcacacatggtggtggggctcaggcaacttttggcagaaagatttatcgtaacatataccaaatcaattttctctgattttattttcagctaatttaattactagaagagaataacttcccagctcacatttctcagtcaggaatctgaatgtgactgctctggtgttgctaggataggaattggggatgttcttaattctgacaactacaagctcaggtagacaggtttagataatgggtgcaaacatccttttgacatcaatctttctgatgcgtgtgcagcccaccttgaagcagattattcctagtgggctttcaacagaagatgaagattctccagggccttttgaataatgaaagaacagggaggaaaagaatgaagaagaggaggaaggagaagaggaggaggaggaaggagaggaggaggaagaggagtggggaaagaggaagagttggtgaaagggaaaggatagaagcatggaatctggtggattgttggtagaaggagctgtacaggtggttccgttggggaaattgtggtgatactggcggagatggtgacatttacaaaggcactgtgaaggtgaacaaatgctccatgagaaagtggcttgtggggaaccagtcaagaaggaagtcaccaggtcaggactcacagcagagaagagtaggacaactgtctcctgatttaactgcaagtggtttgctaacatttctatggctgtgaagaagctcttccatggcactgtggtggtggctcaggggtctgtcaaccataagcccggagctgagtccagcaaactgagggtagaggaaccctgaaagtagaagaccaccatcccccaagctccttgtcaagacatcttgctttctacgagcatgatgacttcattctcatggacccaaacaccagaaactttagatggggtgaaaacagatcactctaatatgcactaatagtggatcatgaaccctggtccaactgtcacaagcagaggataccactgcatggaaaccctccctattattgtcagaccaactataatttatagtatcagccatgaattataagatgttttacaattgatcttctgttgttgcccacagattatcattgattgccatttacaaaatgaaccaataggcagaaaattagaaaattaaaatgcacttcctgctcctctctgatgacatataatctgctctgtgcccagtaacaagctaatattttatatatagcataagacacttcagcttttccttggttttctttcttctttctgcatgcactttccatgaataattgcatgggtgcttaggacaacaccccaggcagcctctgaccacattttcttttgtcacttggatgctagttgagggtggttcagtgagaacatgatactctgtagatagaagaggttgcatgtgctccacagacacctgtaaagcaaagacctaactctcagcacacacaatgccacacttactctttgcttcttggagctagctctggcccccaaaatatttgctcagacttttgagtaaaaaaacagatttgttttccttataaagcataaaaatcagaggttgtatgtatgtacttagcttgaaagggcatccttgcattttcactcctccgagaagcctgagctcgaaacttgcttgcctataactcacgtgggtgattaaccatcaaatggtccaggctgtgctttccagataaagtgcaaagctgggaccaccatcctaatgaggactaggacatatgactgtcctcagcacatttcaggataaatcttgtttgtttacagtgtttatcacctcctcagagagatctgtattcctttttattgggggggggctttttttgggatagtgtctatgtagctttggagcctatcctggcactcgctctgnnnnnnnnnnnnnnnnnnnnnnnnnnnnnnnnnnnnnnnnnnnnnnnnnnnnnnnnnnnnnnnnnnnnnnnnnnnnnnnnnnnnnnnnnnnnnnnnnnnnnnnnnnnnnnnnnnnnnnnnnnnnnnnnnnnnnnnnnnnncctctgcctgccgagtgctgggattaaaggcgtgcaccaccaacacccagcaatctgcatcccttttatatgatctgacttaacatttctcttctccatggagcagctcccttgaactgtcctcaacaccacagagagttgacactcttctgggctgtcattttatgcctgtctcttgcaaggcctttgttctggtcctaacccatgcaccacacacccttcaagaacaaagagagaaagtaaagacatgaagaaacagggatgaggactttttttgtggctgtggtgagtggcacatgctgggcacacactgctgactaggtgtcatcagacagtagttcatatgggaggacaacgtctcattatgttcacttatgaaatgaagggacagcacagccttgttttcctcttttcttcatctttggctggtttgaacagacgtctgccatgaaacactctccaggatgacaacaaccttagccagctgtcttccaatctggcttcctgaaactgtgtgtaatgaatcacggtattttgaaccaaggttgtttgtctgggctctttcataatataagcctagagtaacccactcatagtttccccctcaaacctcctacccatctcacttgagaattgtggataagtggagaacagctttttgattttaaacgatgtttttagctctcagactagagaagaaaaatgagacggtaccccaggatccctctctgaacaggtttaattatataatataatatggctgaattgttcaaggctgaagatcctttcagattgaggtggacttactgcaatattttaaaatacaattgattcattaatattttgcaaggtaatgtatactcaacaggcgtgtgtgtgtgtgtgtgtgtgtgtgtgtgtgtgtgtgtgtgtgtgtgtgtaggtctgtgcgagtatatgcccagtaacttcaggtgcctatgaaggccagagatgggcatctgatccctttacacctggagttaaagaagagcttggaactgatcttgggttcttcagaacagcatacactctaatccagtgagctacttatccagcccctaatagactgttcagcaactgaagttaattacaagacacacgaggaaaaaggtactgactggctacctgggaggtgggagaagaaatgtgtaagccagtgttcccaatgttggagactgaggtgaaaatactatatatttttcttaattgtggaataacattggctactacctaccatttaccaggcactgttacatactctgctttaccaaactcaaacctcacctgggaatgcttttcaataaagattcattaccaatcctgccccattaatttaagacttacagccacctagcctcatacttggcaatagtatgacaagagaaagtaatgagcctttgccctcacaagccacgaagtctcttctaggtggcaagagacacatttgttttttggcaaagccttctgccacccttcagaggcaaatataatgctgcctcctgtgggaagcctttccaaattctcccaatgtgaatgaattactctttcctgttccgacggtgccatcctttactctgggacacttaatttagatgcagtgttctactggaacatccttcattagttcttaaacataaattcttagaattttaaagatacgatgagatcatttgggatccagacaaaggaacagatggtacatgcaagcaaaattgtattaaagagaaacgtgaaagagattatgcataaaatgtcagggaagactaagaagaatgttcaccaatgctcacacacctagcatcatttaagagcagttggggcatgaccatttcagtctccagggtcataccaagctgggaagagaactgctatcgggttagaagcctttgttccgatgggggaccagagtcactgtcagtctgaggtctgtaagcccctctcatttactgaacatatgatgggggaagtacttctgtgtatgtttatcttatcgattatttaataaagttctgcttggccaatgaaacggcaagttaggcaggactaggagtcaaagaggattctgggaaatgtagtagaaaagtggtgatccaggcaggaagtgacatagcaaggagactcatatctaaagaaggagaaacaggaactgtccctcttttcccctccactcctgctccagtggcacaatgtgatccaccggcaaagagggacgccaataaggcgtccgataaggtaagtcttataaaatatatatctaacagatgagaatcccagtcattggccaagcagcattgtacctaatacaagtttctgtgtattcatttgggccctaactggggcgggtggctggcgtaaagctcacacatggcggtggggctcaggcggcttttggcggaaagatttatcataacacacatatgttctgcagctttctcctttctcatctcttcaatatgtgtcccactggaggaaaccaaagtgtccagaggcatgacacaggacattctagagtagagctgacagaatacataagagagaactcagaaggctggaggagactactccgttggtaaagtgattgttgtgcatgagtgaagacttgagtttgatccccagcacccacgtaaaaagctgggcatagtggcacatgctggtcacccagtactgaatacttgaggattccttgggctcattggcttcccagtccagccagtgagcttcaggttcaaggagagaccctgcctcaaaaagtaaggtggaaagtggtagtggtcagttgagttcttgaggttgacctctggtctccacacaccatacatgcaggtggatacacacacacacacacacacacacacacacacacacacacacacacacacacacaatttcgcaaagagaacaaagaattactactacaaaatgatgcatgttttaatataaatcatcaattctcagctatgctagcattatacgcaagaattttccccatctacttaacagtacagagacatgatttttaaaagtacttacaaatttgatgactgttaagtatttctattaatatagctgcttctactgtcttatatgtatgtgtatatatatatattactttgaggttcccatttatctattttattcacatctaatggaatgatcctcattttaaaattaattttaataactcagttttatatagtacccagggaagtgtttgttatgttacttagaacactatggataaatttctattaaataatcatactatcaaatgtttcatcttggctttccatttgttttagaataacaataataacaatgttttcattttagtttttgcgatatagagaatataaacctttatgaattcaactatagctatatttcttccatatttccccaaagagaatattatctggttgtatgagtacaaaaattttacaaaagagacaacatcagattgaaaactgttatgattttaaaggagcagaaactaaggggagaggtgttttaaatgcagggagtgagagaagatattgcagaataatctagctcaagcatagatgggagagtttctccacagtccaactgaggggtgaccaggttctgtgaaagaaggagcggggagcaggaatatagggtgggaacaacttaagacacaggatgccaggctggctctgtgaataagtgattacagtgatgtttaaacagagagaggaattagacaagctttgtttagctctggctttccactagctgtcttcatgaacatgggcaaaaccttataccaggcaggctgtgttgtttcccacgtgtatttcagcactctgggggctgagacatggagactgccatgaattccaggcccacttatacttcacaggtctccaaagacctaaatgaaaaggcacaacaacaataccctttacctttatccagcaccattgttttgactgtaaaagttaattgctgtgacaaagtagccaacacaagtctcctaaggaaggaagtttgccctggatggttacagggcacagcccacagaagggatataacggcaacagggctgtgagggggcagaccacactaaacacatgcagaggggaaggctggtgttcagcttccttcttctcttctatccagcctgaaaccccagcccaagggatggtgctgcccacattcaggataagtcatgctgcctcacttaaaagtttctgaaaatgccttcacagacacaccccagaggtgggtttcaatgatgattctaaaacaagtccagttgatgttgaagtttgaccatcacaatccctacgcactggaaccttcatacaaatgcctaaacattgggatttaagggttttttgaactgggagacacactcatctgccggaaaaagtggggtaccaagccacagaaataaaggcttttattcttggaatcttcaaactctgacccatgagtctcacagaataactcagctcttgatatgacttgtcagagggtcatttgtgttgctctcaggaagcaacgacaacaaagaacaaaataacaacaacaaaaaccccacaatgtttagaagaaattgacacagggaagcacaggaaaaatatcaatctggaactctttgtgttaatgcagcaatttcctctaagactaaatatcttccattttgtagggaagttagctgtaactcaggatgtcaaaagcaaggtgagacattccatccttcaaaaaagtttggtaagctcaggaagaaaacaacccaatagcttcaggaagttcctaaaactgagcagattcacactgcccctccctccctaagcacagataaacaggaggacttccggaagacaatcttaagagcaggcgaactgcctggaagaggctcagagagagcagcagagaccagttgagtttcttcagagaggtgtgaaccagctgagccacctggaaagcgtgccacaatctgctgaaccaccttcaggttgcaagcgtgcgccagttcccagctttcatccaaccataccatagtcaccctctcatgccaaggcataattaggcacaatgtgattaaaatcaaatacagaggaagaaacacagagaagagaaatagtgacagaattcattctgccagtcaaaatagagaacaagcccctcctccttcctttagcatagaaagaaaccctgcagctgtaaccagggcttctgagcatcttgactagtgtgttcagctgtcaatcttgacagttctattgttttgctttgaataaagttcccttgctgctctgcaatcagtgtaagccttaatcccagtcttttgaacaagaggccaagggaatttgtaaacacccagcctgacccatgaccatcagtaacaaatttaactgagggaagaggagctaggcatgaagacttcgtttccagaagaaaaatgatcattataagaagatgatattgtttactgatacccactctgcacagcaataggagagactcaggtgatggcagagcaggtcctcagtgccctgtgacgggatgtctgcacagagtggaactatgggaacatcttgcggagtaactgtggcactgagcccaccagtgtcagacaccatcctaaatgcatctgaaaacacccatatggacttccagacacacatgaggggtagtgcacagaaatcaaaggtcatatagagtaggtgaaggcaatgagccaaggcaatatggccattacagctaatgagacgtgtttctacattcagattaatgggttctgagaaaatctgagataaaaacatccatctctttaactgtccatctctaagctctatctgtgcttcagggtataaccagtgggtgggtggtatctccagtttgagccttgggactctttctgttttgtagatatcagcatctttaagacagatttagggaaggaatgtgaaaatggccatgttagtgataaaaagcacaggacatttgagtctattttcatatctcatccagtttccaaaccaacttcattccttgctgccaaagtctgttttataaacaaacaacaaacaaacaaacaacaaaaccagccatgaaagaaagttacgcacaaatcacagagtgcacactctttgattacacagaggggattgaataactcagccttagcaacaacacacacacataaaccacagtctatgaagctgaggaatgagtgcatcatgtaaaatacatgtggtaacataaatctgcttggagatatatatatatattcatttgaaaaatacagcactaagcaaaatttagtttagatataaatccattcagtgatacctaataatgaatagtatcatctatctaatgaagatgatgtttacataactgtttttcttttctaattttacaggaaaccagttcattaaatgatgtagatgaacatacatatttagacaaaatagcaacattattattacaaaaagaaaagcagtggctttccttatattactacctcttgactttaaaaaaaaaattgtatgtaggtatctttgcctgtatctttgcctgtgaagttctggcagagtctagaagaggacattagatctattggaactctggttacagaaggttgtgacccacatatgagtgcttggaattgaacaccccccccacatccccagtcctttgaaagagcagcaagtgctcttaactgctgattaactcatagctcttaaaatttaaacactgagatgagtaactcttgacacaaatcaagattattatagtttcacccagaagatggcatgaactgcatttgcgtttgaataagaaccatgtaactcctttcctgtctacttttctctggtgttgttgttattgtaaagaatgaagatgcatttcaaaggcaggaaggcaaaactttaaagttcctttgaatggaatcattgcgtttagaaaaggcagtttaaaaacacaacaaagagccaggcattggtggcgcactcctttaatcccagcacttgggacgcagaggtaggcagatctctgtgagttcaaggccagccttgtctacagagcaagtgccaggataggctccaaagctacacagagaaaccctgtctcaaaaacaacaacaacaaaacacaacaaagaaaagaactggggcacttagagcaaagagcaggcagaacatgtggttgcatctctgcctaaagtctgaagtatctaagatggggagccacagggccttcacacgggtgcacccgggacactgctgagaggtgacaactttaaagtatcatcaaaattagcagaagccaagtggttctttcagtgaaatactactctgattagcaaatattcagaagtactagaaataatacaattcaagaatattcaggacgatattgtgcaagtttctttagctaaatccaggacatggtctatttcttagaaaggacacatgtgggtttaccttaatatgtacagattcagaaataactctcttatcattcatttatttaactcaccctgtaaatatctgtaggctgataactatgtatcttactcattgaatagagaagatgagatttatatgagatattcttattatctcttgaactacacactgttctggattgtggtctatcatctatcaacccgccagtccacctatctatccatatctatttgtctatctaggtctactgtatacacgtatatatgcacattcacaaagagctatgattctaaacctttttatttgcttcagaaaaaaatataataaaggattgcaaattaccagagaagaatatcttcacaaaattacacactattgtggacctgctgttcaagagactgagatacttgtaagaagagctaatttagcatctaaagttccactgattaataacaaattaaagcaaagacgctggcatcaaaatacatatagaaataaaatccaagctattagcattaatattgctatattaacccctaaatgtcttcttttctctgggttcttttttaaaaatcatataacacagtaaaatatatatattagtaagagtatttatagactcaaattcatctgtttacttatgtgacaatattaaccagagaaaaagagaaagtaaatttacatgtacccatttgtttgtcttggagcaaatgtcctttttgcctctaaattatgatggtctccatcaccactgaaggtgaaacgagctttgcttagacctctcatcatggtcattttataagacatttattttctgattttcttaatcagaaatgttggttaacggttaatgttggcatttattaactaattttatttgtatcacaccttttgaagacagtagattcagaatggtgagaagaatatagatgtcgttaaaacagaatgagatatgaaaactacatttcaacttttatgggctatttttaaaaagcaagtttctcacagctgttacactagagaaagacctactcagaagtttgttgggttttgagtcacattacaggtcccaagcattatggaaacctttttatttaattgatgtgttaaaactaaccttaacgtcacagccaagattcagcagaatgtaaagttcttaaagctatctatatattaataggttttttgacatccaaaaatccaacttaatagaatttagaatctgttttgtcttgattttttttttaatagagaaacccaaatggcagcaagtaagattctaatctcccaatgtaaaatcattattcacatgtatatgtgtttagtggtgtagctttgggggcttaggcttgcaaagaattctattattaagagaggaaaaccaggagggctattagaacaatgtcatcattgcagagctccctacagggcatccatccctaagcaggatgccttagtctagacagggtcatccaccagggctcatccagttctacactcagactaaagcaataatttcacctttgagccttgtaccagttcaatagccagaccctatttccccaaaacaaatgggaacatattgatcttcttattgaactatgcagaatttatctttctaactacttgatatttttaaattctgaaacctgaagctcacatttgacgaagagacactttaactgacgtgccatccttgagaacacgctgatggtgtgaaggcagcaatgctgtgttaatattttgacactactgactgttattaataagccggtgacacttttcatcacccttttacaggaaacatctagtcgaggcttgtgatttcgaagacagaatattatcagagtgctaaaagtctattcctagctgtgtcattaactagttggatggatgtagacgagccaacgggagtctcaggatctctctttctgcacgaataaaagggcagtaatttgttggggtttggggcatgcatgtgtgtacataaactaagatagaggtcaaccgtggtgtccttgcttaggtgcagtccaccttgatttttgggtctgggtctgtcatttgcttaaggctcactgagtaggcaaggtgagttccgggaccctaatgtgtaccctgcccagcactgagatacaggcacctgcctccaaaccacactttatcctgtatgactggtaacacaactcaagtggcaaacattttattggctgaattatctccctagttctgggaataatttttttaaaccttgtacatcactggataacttcaagatatataggatctgttacatgtgaaaaatattttgaaagtagaaactttcaatagagatatcagtacagatttattctgtaaggtgcgaaaatatttagggagattaatatggcagagaatcgttactttttctatttttatttttggtagaggacatctgtgcaccacatgcatgcagtacttgtggaagccacaagagggcatcagatcccctgaaactggagctgcacatgcttgtgaattgttgtgtgggtgctgggagtcaaacccaagtcccctggaagagcaaccaatgtccttaaccactaaaccatctctctggccctagcggttgaatatgtttacatattagacaacattttcaacccagaatatcttcatttaagatttaacatacacaaagcataataagatccaaatgataaaaacagaaaaatcatgctatgcagcttctgtgtgaatagtgagcactgtaacgtgtgttaaaaatatttataaaaggaaaagaatataccagcttaaataatgcacaaaagcatcaaggggatttaaagaaacttcaaatgtgtataagcaaaacgttaaataaaagtatgtgagattactgatcacagtgtttatgacaacttttagaggtaattaattaatacgttaaatattttatacagtatcatttagaatgcagcacatacaataaaagcacggtttagaaaataatataccaactacatttataggaatatagctgtgaattaacaaaagcaaatcaggtgattttaaatgcataagccaaactctaactagtgactgtctctggtagctgaagaaaagggagtaatttttttccctcatgttttaaaattttcttttatatcacttttgtagatggtaattctccccttacccaaagttctatttttcccagtattggttactcatggtcacccatggtctgaaatgtgaaatggaagagtccagaaataacaatacatgcctttaaataatttttatcatagcctaactaaaatcattatcctgtttattattaggcatttttctgatatgcttaatttgtaagcatatgcttaaacttaattatagatatttacatataggaaacacagtgtacatagatttattgagtttccagtattcactgagggtttgtggacagtttgagtatattaggggagaactatcctatgtttaaattgcacttaatcttaaatggctaacagtaacaggcagcacacaacacttaaaagctacaaaagtccttacatgcaaattaaccccaccctccttcttttccaattacccattccatgtccagcaagtagtccaccaataattacacctttccacatatcccctgaggcagtctgcacataaacaccttgatatacaactattaagagagtccacaattttctgcaaagtgctttgcaatgtaatttgaagattttcttctatgtatagaaattaatggccttccttcagcacaaactgatttaatctttgcagaggaaaaagccatggactggaaagatttgagaatttcaaaagtggcaggaaaagaattgataacataaaatatcaaactgatggtatcaggtaatatgtgagggaggttctcaggaagaagaccacagagagcagctgaatgggatgatttcctgagacaggtcttcatcagccagacagtcggaaattacagagatggattggccagggccagctccactggtggcggaattttaacatttgaaagtttaaggtagccaggttttcaagcagtaacatttgatatttggtgttgggccgccctcagtcacagtaatttctcccaaggattgtctatttctttctttacactttttttttttttaaataagcagatcctgtctcttggtgttaaagttgggtgcattgtcccagacaggcaagagtaattttcagtctgggtgacttggggcagagtccgagtcatgtggacacataccctctgatgactgtatttcccagtccatggagaaagtgtacaggtcacagaagagagtcaccacaactacagaaatccataagaggactggatctctataccttctgtctaaaaaggtcaagacactagactaacaaaacaagcaaaccagctttgtgaaagcaagaataaccaagcagggctgcttaggaaatgcacaactctgccatgaacaaagtcaaacacattgcaaatgacaaatctcactgaagtaccaggctcccacataggtgactaaacaaacaagctttctttgtgcttcatcactgccctgacaagaaggagaaacttgagttttcattgggcattaattttttgtttctatggtacagagatattattttgaagagaatttacaaaaatattgagagaatctcaggtaaccaaagtatttagacaagatctctagaaacaatgaaaactttgacagacaaaagaaaaccacttaaatttaaggggtctctaatctttgaaattctgcagtacaactgacttcccctaagagcccccttctctgaatgctgggcatttctctgtatcatttacagctttcaggctttcatctccctctgcttgtaccattaaataaagggcaccctgataatctgcagtgcaggctctgttaatcgcagcattctcctatggtttgctgaatttcccaaatcggatagaatgacaaaggccctaagcttaaccagatgcggttttatagtgatgtcactaggctttttcccataatcaaagcccccaaaacatacagtatctgcaacaaggttaatggaaatccccaccaagggtaaacacttgagcagattgtgccatcagaatatgtttaaacactatttaaaaggattttacaataagaagatttggttttacactggtagacacacaggcacataatacaacagagctgttaacaaatgactagaatgcctttctctcttttgcccatcccgcagccatctgcattgttagcttcaattagcttcatgcatttgaagttcaaaccagtctgcccctctgctcactgcatggagaggacagtggtccagccaccactatgggggaataatcttatgttttgatgtttgtatttcctataacattggtgagctcatgctttcttgaagatttattttaattgtgtataaaggtagctatctgtgtatggataggcacaggtgcctgcagtgaccaaaaaagggagttggatctcctggagatagaattacaggcatttatgagggccagacacaggtgctaggaactgagctggctcttctgaggaaaggcatgtgttcataaccactgggctatctcttcatgttatgtttacaccctgaaaatccttctccattggcttacaacaaagtctaaaacttatctcaatgtatcctagcaccgttgaccactggactccctccttgtttctaactgctgcccaagtctaagcatgttactgtagggagacactgtagccccgcctcctagtagcccggacaagtgtgccgggcatctcatggattaaggctgagacatgccgggtcacgacaaaatgttacaatggtccctgggtgtgtttcatgaaatgagcattataactgtcagtgcagtgtgtcctgccctggcttggtcccgcctactccataatgtgtagcatctttctgttcttactttccagaaggttcctcatgctgaatggcattctacttgggtttctatctgtttctgtcatttccatgataggctgtgagagacaatgacaccgtcttatcactgaacctgcaacctcaatgcataaagatgctcagcagatattttacagattgaatgaacaggcagtttagatgcttgcttgaaggggattcagaattaggaacctcctttctcacaatactgatgtttaccactttataaccagagtcacatggctgtgaaacagtctcgattttcacaagtgaatggcaaacaccatgtctgtgacatcacaattaaatttgctatcacatttaattacaaaacaaaatcctgaagtagtttctatccttatccttctaccaggaaaccaagggttatcagggtggcatagaactgtactaaaccctgtggtagggaggcttctgagggacaatccagtcaacactcatccccatgcaactccttcctttgtggtttagacagaaatggtgaactagacttgataggcttcctgcaaactggtaagtgatatataaaaaactgagattatcctggtgggtgtggtctaattacaagcccattagattagaatttctagtctccttgtattcactgagagtgaagtgctgttccctgtgaatttttaaaacaaagaaaacactacaccatatatgagctttgttgtttcctctacacacacacacacacacacctaaaataatcaggactggttcatgattaatagtaaccaatagtaaagcagaacagttacagtaagttgaccatgcacaacagaagccacacagaatgaaaatgaaggactcctgtaatgttcttcagctggtggcagaagaatttggacacaagggggattgaacacagtgaaagttctccaccacacagatggaaaggactctgtgacatgactgatagtgacctctagagttgagaatagccttgtctgaaaacaggagagaatcgggacttacagaaacaggaattcggaacctaaaatgagtctagaagagcaggatttcccaggagaccccaactctccaactccttgatgttatgggccctgactcaggaaccatctcaatctaagcaagcttctggctctttgacatatgagctcatgcacaggtaatgcttaaagctgattacagaatctcccctacagttactatggccgaaagattgagttctaactactgatatgtggtgggcaggaatcacctattcactcccagactcagtccataaaaactccaaaagtgatctttccacgtctgctgtaccaagggaggtaaatttagagaaaccttagtagtcatatattaaatatggtagacactatgtctgcctttgtccttaggtggctgtggagaaatgaaagtatttaccaagttctgtgtgcatctcagggttgttaagtgagcaagaaaccctatctctcctgttcctgcaattaccggcttgagtgtgtgcacatgtatacacaggtgttcagatttcacggctacctgaagacaatgattcagtcctgtgaggagtcaaggaacctggattccagtcagaggaaacaggaaaaccaaaggcctaggaatggggaaatacttgtgtttacaagagcaaacagaaaatgctggtataacattgtagaaatacatgagggtgggagaatgatacaagggcaagaaagtagacaagaaaatatggactatatatcaacagaaggaatttgaatgttaagaatgaatgtggggttgaaggagaagtgatccaacattaaattcagatttttgcttctgacaaaagagtaaagattgttcccgagatgaaattcaggaagaaaagcaaaacgttgaggtgtggccaataaaataaattcaattttagtgagttggctatgtatttagggatgtgttcatggctggaagaaaattatcttagctgaagatcagtataaatgggtattgatcctcatggaggaaaactaacatttgttgaagaagaaaaagaaaccacagtagagcttgaccatcaacagggaaatggggaaggtgaaaatgtcactgacacaaggagcggaatgtcctgggatccaaggagcatcctgaattatatggctgccatattgatttgagtcaggaagaagtagttgtggaaaacacaagtaagacaggtaaagtttggacccaatccaggtgtcctgggttaaacttctgttttctaaaaggagatgttcaattcctaaactcctgtacatgtgttcttatatggaaatagcatctttgaggtttagtatgacctcagcttaatcacgttaagtcaaaatcaaggggttaagtaagtcgacttaatcaagttataaaacataatcaagttaagtgaaggccacaggggattagggcagggccataaatccaatatgactgctgtgtttataggaagggagagtgtcatgtgacggtagcagcagagatcagagtgaacaggagaaacacaagttagagatgtagagatgaagaccaagcacagatgaggggacagcatagagcagagagccgcccagtgacagctttatcaaagttacttcagcaaagctcgggcatgaggagcacagttacactgatctatatctgatacctttcatctgaatgtgctgtaattgtgatggcacaagagaggtgactccctgaaaacaccgcaaactctctacctgaagtaaggataggagagagagggtctcaaagacagagagacgtgggttcaaagaaaaataagagtgtaaaaggagtcctttactggtctagacaataaaaggtcagagtcagatacagagggaaatgcggaaatatcagagagaaggagcaaaccacagcacaccttacctcctaagcatctcggcagagaagagagtgatttcctgtttgtccctgcttatatcctgttactgcccagctatgtcacttcctgcctgtctgtacagacctccagatctctatggctagctagtggcaagctccattctctgacctccagacatactttatttgtgcaagaaagatatcttcacataaagagtcctgagcttaaggaccagggaaacatcttgggaaaaaggcagaaagattttaagagcccaaggatcagggagtctactatgagatctttttttctatatatgacaaggaatatgtactcttaacatctcaaaaatatggtcgcctaaacaagacctgcatactaacaatatcagttggaatgccaacagggttggaaaaaaaatgtcaccaagttccatcactagatgaagtgctgtgattggtaaggtcaagattcagtgttctccacagatgaactctctggttatctgatcccatatatatatatataccaatatacacatgtgtctacatgccagcacacacatgcatatacataccagcacacatgtggatatacatactagcacacatgtggatatacataccagcatacatgtacagatacacaccagcacacacatgcatatacacaccagcacacatatacctatacatactagcacatatacataccagcacactataaatatacataccagcacacatgtgcagatatataccagcacacatatacatacaagaaaacccaaatgtaatcagaaggttgcatttaagctggtcagtagtggagaacacctataatcccagcactagggaggcagatgcaggcggatctctgtaagtacaaggccagcctggtctacaaaacaagttccaggacagctaggaaaaacaaaaagcaaaacaaacaaaaacccaggctgtatttttgtatttacacatacacacatacatacatacatagacacatacatacatacatgcacacccaccaataagaatcaaagaagtggccatacagtcaagagggagtggggagatgtggtaagagttggaagaccaagaaaaaggcatagaaacgatgcaaatacagcgtccatgtgtaaaactctcaaaaaagaagtaaaaacacaatgagaagaccaaatattttaacataagtaaattagggacagagtataaaacaggtgattcctgttgggtggggctgtgagcagtgaacctgggagacacgaggcagtactaggtgaggacaaggtagactcctaattgagagacagtaatgccaatgcacaccatgctctctgtagatgagggagaatagagattgaaatgccctgccagtcattcctgggagttcaaagaccctagatgctggagaacttggagtcaggaggaagcactgagcttcagagaagcaggtaggaattttaggaagggtgaggagaacctcccacaggcaatgatgaacacaggtcttacagaatcagtgagtggacgagtgctctggaaagaaagatgaatcaaagcaggggacttcaccaggatatccatggcttctgattgcagccagtggctttcaagcccctccctctgaatcagaagtgatgtgaagacaaggcctttaactctttcatctgctctgaagcccttaggggttattaaacacctgcgataacaactgccaaattaataaatcactgcatataaaaatgatatgccccccacattgcccacactgacaactttaactgtcactgaatggggacattaagtataaatatggtttattatagtatcaaacactcagccaaacactcaacagagaatagcgttcacggtggactgggacctcgtcccacacacatgttgaagtctgaaccccaagagtctcatacggtgtcatatgggccttccattgtaatgtgttaataagaggtgatcagggtagattccaacaaaccaggatggtatcctaatggaagtagaaatttagagatagacaaactaacaaagagggcacttcatggggatggaagacacaattgtggtgacatccttacaaatcaaatgagctccaaagagggccagaaagtcactgggaaccaggagagaggctgggacagtctccctgcagacatccaaggcaacaggtgctgctgatgccgaggtcttagccatcgtgctccagaatggtgacataaacttctggaaggcacatggtttgtggtcctttttcacagcagccaagcaaacttttacaagtagttaaaattatttttttttgctacttattgggtgattaaatgaaaatttctaggaagctacatgaacagcctacctcattaaagccatttaccaagtttagcatattaattactcctgaattatgcatcagtatttatttacttcaaaatattaatttactgattccaggtgtttttttttttcaaattgattcatttaagtcaatccaataaaagtttgtgagatgccaatatgtccaagatggaagacacttctggatatggaaatgattaatgacacaatgattgtacacaacgcccttaaattcatgttttaaacaaagatgtaccctgtttaaaattggtgtatacagaagaatacattcaaatggcaaatgtgtgtgcaatgacctgaagaatctgtgaatcaaaggacaatgtgggaatgaaggcaaacgatgtgtacatctcgacagtagcaggcagcactgatgtacaaagtgtaaccctgatagggtcaaacaaaagtgagcaaagctttcagtatgactcaatatcagaggaaagactagggagaaccaggaggtaaacagtaatccatatgccccatcagatgtctaaagtgccttttataccaatgttatggagcacattgaaatggaaaatgccaaacaacaaaatattatttctggattccttaaaccatgaaatgacttcctcaaggaaaacaagaaagaggttgcggagactaggttattagtaaaatgactgactcacatacctgaggacttgagtttggatccccagagtccacctaaatgaggtaagtgctatgtgcctgtggcggcagagcagtgagcatggagacaaaaggatcccgaagctcactggccagccagctgagcacagacaatcaactacaaactagaaggagagagactctgcctcaaaaaatggcagagagcaatcaaggccagataactggaagggacctcgactggcacacagagcagcatatggagcaagtgcaccactccatgaagaacaaaggagggaggaaagaaggaaggaaggaaagaggaagaaaggaatgaaaggagaaaggaaggaaggaaggaagggagggaggaagaagaaaaaggaaaagcaagtgctagaatcccattgctaggctaaagcagagcctgcctcctcatatgtaaatgctttcgtcgcatgcattcatccatatgcacacaggcacacacatctataattcactgaaaggtacacacactgcatcctgtatgttcaaatccttctttactatggttctccattacacttcaggcttcagcactgtcagcctatggtcaccatattccatcactgaatactcagagcagtgggttgggatcttctgtggctgtgcactgcagtcatagtgtcaccgcagtgaggttggtaacacactgagctgtgtggtgagcacatagctgaaagatgactgggattcgtttctacatcagactggaagaagaagatgtgtgtgtctcagtctacaaaatttcagtacatttcaagaactgatactcttttagcgctgcctagagtcagaagggtttggtctgtaggtacaataaaaaagaatgtgagctgggcaggggtggcacacacctttaatcttagcacccaggaggcagaggcagatggatttctgtgagttcaaggccagtatggtctacatagtgagttccagcacaggttcaaagctacacagagaaactctgtctcgaaaaaccaaaagaaaaaaaaaagattgagtctgatttttgatttattctccacctgactttcaaaattgatcaatgaaaatattgaattatacttgatccactaacattcagtgtacaaccaacctatgttgttaacagataagacctgacgatacaaagctggggcttctaaggtgttcatgatgctgttgattgatttgggaagtcgttgaacatattacaatcagccaagaatattcatcaagctgtatccttaacacacactcttctgtaagatatttcaagagttaaaatagcaaattaaaataatcagcaggctttatttgtcaaggtctcaacaggtcaccttgtatcaccagttctgtattgaactccactgctcttggaagttgatgtcacccccaagtcgcccctaaagtccctccctgcacttagaagaagaagaaatatctcaagttatcacatcatgtgtgaataagagagcagatcttaagatacaaatatatgcattttatttcctgtcaggtcagcacaatgtacaatgaaggtctagcttggaaggatggcccttcaggtacagtattcacagctaagtatgagagacagttaagcactccataggagctacttcattccttctgaccctgtgccactcaataaatgtgactcttgcgaagaaagcatcaacccaaggtgccgaggtatctagctacatcctgagacgctaccgtggaacctttgttcacggagtcagttgctttagaagctgacctggctctagacacttttcacagctcttttccttccctgtatcctcaaattttctttcaactttgtataacgtaatggcatactctatgtcataagagagggtacccagtgacttatggaagccaccatggtcttatctggccatggacacatgctctgccttattaacatttaggcttgcggtttaagggccaaagctttgtgaagatccctcctagtaatgttatgtgtaaggactgtcactgcactgctgtattcaaaaactgttaaatcgggactagggattcaactcagacactagagtgtttgcttggagtgcattaggcctcggtttgttccctagtactgcataaggagtgtatggtggcatacagctctgataccaacccaggggaggtagaagcaggaacagtagcagttttaggtcatcctcagttacatgatgagtttaaggccaccctgaagaaactactagaaagttttgctttgctacaaaggatctattgtaaagcagcagcaagaatcaatataatgttgctcaaatttgtagagtattgataaagttctttccagtttggcgagaggtacctaacctttacatctgttttttattgtgtcacaaagaatactgcgacatcttcaataaatttctttttgtaagactgaagtgtttgatgagttttatacgtggtactgtttgaccttgacaaataagaccaaaggaaagttgtagtacgtttagtaggttaaagatataaatatttacccacccaatgttatcagaatttcacccaacattcccctttccccctgcctctcttagctttcctcttccttgccaagatttccttccctgccaccctcacacactacactgctcactcccatattattctaacccatggttcattacatctgccttagagaatcctaggttcaccatactgggcctgtggggtttgagtgaaaatctgccctataggctgatatatttagacacctagtccccagttggtgttgctgtgtagagtgtcttaggagaccatggccttgttggagaagcgtgtcactgggtgtgggctttgagagccatttccagctgttctctttacttggtgcttgatactcaggatgtgagccatcagagcactctctctagccaccatgcctgctatctactgccacgctgtcccaatcttcacaaactcttatccctccagaattgtaagccaaaacaaacccttccaaaagttgtcttggccatgtagttgtagtggtgaccatgactcgggcctgagcaagcacatgtgttatcgttgatatcaggcgaccttcacctcttaagaaaattcctctttgccagttccccaccagcagttgagaaatcatcaacaaaacagcagcttcagccatcccaaccccgtcagaagaactgttttgaggatttgttcttcttgcttccagggtagcatgactctgggcaagtttgtggccagtttgctgaactgatttaactgatttccaccattgtgctgctcctgtccttcaaagccacatgggcttctctgaaacattcctacaaacttcttaatgattgcctgattcaggtagggtacccctctacaatgagaatgatctggttggccaccgtttggatggtcttcatccagcagtatgttttccagccttaacttaagcagtcctgggatgttgaatactctctaagaggcatctatttcaacctagtcatgggtgtaacacacacacacacacacacacacacacacacacacacacacacacacacacacacacggctcactgtagcccgctagtgttatcaatagaggttcttcaatcttttgataatgcttttaatcagaagttttaaaagcacaattgctttcaactcaaaattcttaaaaaaaaatctgtcatgggacagaaataagagattaatggatatcttgcaggaaagataaatggcaccaccagaatactgcaaaactgggggggaaattaattgaacccttacttttgataaatatttattttttgcagaagaaaaatgcatactagtttaagctgtcattatactaacctacatcctatttttcatattattagtaatacataatgtggtagtttatattcaaaaataaaactagaatgtatatacctcatgtatttatccagaaatacaccaaggttactatggttacgaaaaatccattacctttgaatatggaatgaaaaagtttgacttaaagtgtgtgctatttattatagcaaacatcaacagccttcgggaggttccctaactggattcatttttcagtgtcagaactgacccagtgtactacaagcctatggcctatgcaaggcaaaaatccgaactgtgcacatttttaaatatagtttgtactgacccaaggagcagcaatgcgtctgacttttaatgcttcatatttaagaggaagaaaaaaaaaatcggaacacccagaggctaagtggctcctgactggaatgccctgctccaacctcagtctcccttggcagccaggccattccctatgcaccatgggaagatgtctgctcaactgaagcgtttaagagaagttacagacaagtgcaggagggaggggcagtgttggcactttgaatagttaggaaggggcattacatcatgttaggaagggagtttttagtacagatgacagcaaaggagtttaaagtgtcattgattctggtcaagaagacattatgaagcactgttcttgaggaaatttcaaaaattttccttgccctagtaaggttttgctcatcaccagtaattggatatttcgagataaagcacaaatgtctactaatcactcagaagtgcagttggtgggaccagaagttacaaatgaaaataaatttcaaatgttttttgttagtaaaaatatcaaaaaattgaaaatgatattcactactgataaattcagggttagggttagggttagggttagggttagggttagggttaggattagtaacagtgtagaccaacaagtttgtaaaagaaaaaagccaaaggaacagcataaaagtaggaaaggaggaagaaggaagtcatttaggatcaggggtgagtgtgcacacaatacattgtatacaagtatgaaattgtcaaacaagttaatgaccttagatttcatttgttccacttttaatacatagcatatcaatattcatatatatagtatttatcacaacagtttttaaaaagacaaatgtttatatggttgtatttgttcatatacatctcttagatgaagtatgttattaaaatattctgagccgggcgttggtggcgcacgcctttaatcccagcactcgggagacagaggcaggcggatctctgtgcgttcgaggccagcctggtctacagagtgagtgccaggataggctccaaagctacacagagaaaccctgtctcgaaaaaaccaaaaaaaaaaaaaaattctgaaacagagtgcaagagagatcgctcagtggttaagagcacttgttgctctttcaaagaatctgggttcaattcccagcacctacatgatggtttgcaaccatctgtaactctagttcctggggatccaacaccctctttggactacctcatatgctaggcatgtactttgctaccatgtagacccacatttaatttggttcatccaattactgactttttttggcctagctgtgcctctgtttcgctaaccataagattagaggaatatgaagtgtccttcctcatttcttctgagggtttgttgttgtttttattagtttgtttttgttggggctggagacaattctgtgagatattgctatagtgatgcttgcgtgcttcttgcttccattttcttggaatactcttgcaacctgttaccctaagggagcgtctattgttgatcatgagctgtgtttcttggatgtagccacaagtgtgcttctccgtaagatgaaacccattcccagcagcaccatcaggtcaagaacctatggccagacgggccacaggccccaagggaagcttctactgttgaactgctatatggatttagcattaaagcaaattctaatgacctaccattctacccacagaccagtgcatggctcatactgcagctgagacacctctgtctgcacatggtgattcccacggctggcccatgtaaagaaaataagaggctgtatattgttcagccctaatgggacacatatacttcaccctcctctcaaggcgcagggatcctttctgaagaagggagagaaagaaggtaatagccagagggggcagacaaccacaaggaaacatctggacatagcagggattctgcacataagaactcagagcagtttcaaccacacacacaaggcctgtgcaagcctgagtcagacataatcctagcatagagaggggagttgggctactggcaactggtagcttccgggaggggaagagacagttctctccaagagtgtgggccattgctcgtcgactacattccagtagacatccacacatccaacaatattagggcagccaaaattgtttttgaaggttgacaaaagagacagagagtgattctgtcggtaaggaagaggggaggcatcacgcaagagaagaggagggagctggatgaacatgatcaagatgggcccggaattctcaatgatagaacaagaaacaaaggtctaaaaacgagaagaaacagagtcatcttgcaaatctgaccttcagctttaaggcgtggtagctcttctccacggtgaacaacactaaggcctcagaacgcttcctatcttcagctattcagtggcaacaacacgaactacaggactcatgaggaagctactgaaagtaaaagccattggtgacgcctcagacaactttcttcaaaacctcacactcagactgaaaccgccgaggacttgttactagagaaggcagcagtgagcgcgtgagatgagtgtgtacagggcgcacaagagaactggtctaccgtgacagtatttccaaagtctcccactgcatgtccaacactgttctgctggtgctttgttccaaaagttacagaaggcagcaggattttgcacgcagtattagaaactggtgtgggttcttcagttctcccctctttgcatggctttccttctggctttgccaaatgccacagggcaatagcgtgacatgtctgtaaaatattcacggcctacagtagttcacgtgtcatcagctgagcccctcttgtgtgacccaatcagcttgtgctgttggccatggatctagatgcttcccgtttgactgcttctatttcctagagctacctgttgactctgttagttcttcctcttcttcattcacttgaaacaggatcacttggtttctaggctagcctcaggctcagacaaggctgaccttgaacttctgaccctcttgcttctatctcctgattgcaagaactccaggcatattccagaactcctggttgaagtggtgctggggattgaacccagaaccagcggctcatcaggcaagcactccgctgactgaaccatagtccttgtcatctattctctctctcatccctctctcaacacttctgagttgtctcccagtctgcattaggttttggacaggtagcaatgaacaaaacagacatgcacatatcctcttgcacttacaatttagagggagaaaaagtaattatccaagataatgggggaaacctagaatttcttttaaaagcacggcaggggcggttataaaggtatttggtatctcaggaatcatgagaaaggtcttacaggaatgactctcaggaacagaatattctgtttcccttcatgaacaatagtatattttgctcctgaaaaaagtgccctatgcattactgcatatataaaattctctggtgtgttttaataattatcatttatgaaacattttctgttgtctacatatgccaattgaaataatgtcattagttcaatctttttttaaaaaagatttatttaccattgctttatgcatgtgagttgcgtgtgtagtactgtactgtgtgtgtgtctggtgtctgaggaagaaggcaccttagaatttgagtcatagattgttgatagcaccacatgggtgctgagaactgagccaggtcccctgaaagaacagtaaatgcttttagcagctgagtcatttctccagtaccataatcaacccaattttatgatcattctattatttaatttgtaatatgaactctgtatcctacaggaaatggtaattatgccttttatttttttcttatatgtttttgagacaggttctccagatatatagcccagggaggcctcaaacttaccatgtaagtttaaatctcaatctttctgcttgagttttcccagggactataggcatagacctggttaataattacaactttgctctaccaagaagaaacaatgtcttatatgtattatggtgtctatttcatttaaaatgtaaaaatgtgattcttcccactgtattagtttcttttctcattctgggacaacatttgtgacaaaagcaccttaaggagggaaaggtttatcttggctcactgctggggtgaacaggtcaccactgcaggggcagcatggaagaaggaatatttggcagcttttgctgacatcaggaagcagagaggaaagcaggcactcatctgactctttcctctcttgttttttattgagtctagtgtgtctgcctatggaacacacctcatacctacatttctacatttgtgtttgtttttcctctctggttaagtccctgctcaagtcttcacagatatacctagcactgtgttgcctaggagattccacatccagtcaagctgacagtggagattaccagtcatgctcgtgttatagatgcatgtcaagactcagagaagatgtcactgaaatccatggttttcagctgactagaatgcttagtcagtcccaatgtatgtcgctcactggctgcacaaccttttcctgtcatatctcaatttccttgcctgcaaagtggagacaacatctaccttgtggaaaaacacatcatctcaggggtccatctaattctgaatgaaacacaaaagtcatagttcttgtccactttatagtctcagactaaagaggagacaaatatacaaaggagactacagctgcccagcaatgccttgtgctggtctctgaatgtgtcccaggaagccagggacggcgggaagggaagagcatgatggttcccgctgtcaccttagtatctggcattcatgtgaatgagtgaaaccgtgaataattaactctcacttattatagcctttcacaaaactttagtatctctaggactcagttttcaaatcaatcaatgtttgagcaataccatctcctcctgaacagcacacaacactagaaacacaaaactcatatgaacaaatactatttggcattaacacaatgcaaataccatacagcacactcattgtgagcctctcaaatttagaaatcttctgacaatttcctttgcttgggtatcatataatctggacctacgggtttttttcttaaatagtctaagatttataccacattgaatcatccatctgcatcttcaattatttctcatgcaggcagatttcaaatagtcggccatgtgaccatggggatctggaaggatgctaccactttagtcagctcacggagccagtgtgcactagggccacatatacactcagattcaaacacttggtctgtggaatccagaaaggtctggcctagtacagtcccaaggttcccttgataccacaaggaggcaaaaatcactcacctgatgcagatacacatacacagtggtcatctagaaaacacatatacgaatctattacctgatagtgacagtgtattacctgtgacagtgtagctttgttccttgcctgtgtagaccagcctcccatccatgtataaggagtactgggtaataattccatttgcttgtttgggtggactccaggagaatgacaaagagttgggaagggacaaggccaccggtgtctgaacctcttggggtgctgtgggaaaataaaatagtctaattttagtttacttttctaagtaaaacttttcagacccaaaccaataaatcatgggctaaaactgtagtcccgtgcatggaagtgttcttgactcgcaggcagcttgtcagtaattgctttaggaacagtgctaaataactgtcctgaattcctgaaaatttgcatctgtgatggatggggggtccttctctagtgcacttgactgacgcttgtgttacttcatcaaaagtattgttaacccatcatgtcctcgtggggctgagcagatggagcagtgtgcactggcttggcagagcacaggatttgaaatgggcaacatggtgtttcctagctggggtgttttaaaaactctccaactacagcaatgtggacagttaaaataattgtatattgagactacactgtagttgttgaaataaatgtgtttacacactagccaatgaattgaaatcacagaaaattaaaaacaaaacaaaaactaaccagaaacagaaatatcattctgtgtattagacatggctccttagaaaagagacttgggaattgtatacataatgaggggatttgaaccagatgagtgggcaatcccttggtgaaatggttgtgaaacaggtgtgaggggtactagcaaagcctagacaagagggtggagaggcaacaatgtgaaagatcccagatgatggctggtgggagtgagtataaaacaggatgacgatggtgtaccccagaagacacagtctcacactgagagggacagtgccatttcatagatgggctctggatggtgctgagaaaggacagtgatgtttcatggatggcatagatgagggagtggacgctggtccatagcaggtgtaaaacagagaatgaaggatctcaagaaggattttataaaactctgcatctcatcaccatgtcatcatatcggcttctgcttgcttcactttccccgtgtgtctatgttttaacatctttcctatagaaatggtgtttgcaaaatgtaaaaggtgaaaaggacaaaaaggagattttatggaagcatgtacactggcgggaagggagggagagagagagagagagagagagagagagagagagagagagagagacagagagagagagagagagagagagacagagagagagacagagagagagagacagagagagacagagacagagacagagacagagagagacagagacagagacagagagagatagagacagagacagagagagacagagacagagactccaagtgagcatgtgttttctggctaacttttgctataaagaccaagctttgaaatctgagtaactttcctgttaggcagctcacaggaaatgcttccccactgccatctaatgtatgttttctgaaacattaatttagaccaacagtttgcacatctcaggtacaacagaagtcagactcaagtaggaggaagggagcagtgattgtgcttcgactggcatctggaggttctgtcctcctgaaatcatggttgcccacactggtgtttagcagttaaaagagaccatggaaatcaagcgtttgattctcaatttcaaactgtgccatacaatcaattctttttagtcagactgtctctagatttacttctgagccatagtaaaatgaggaagctttcattaatctttcagatgcttcatattaatgacaaggctcttgcatgaacaatgtaacagcaattaaaaagcccattaatctgcattacagctattaaagatgcatgtcattaaaggctatggagtttgattcattttcgcacccccccaaaaaatgggagcaattatggcctggcaatgcactttgtcatcaaattaggtcggggttttccagcaaatggcctcgcagcatttagctcttctcctattttattattcatgactgaaatgtggaagtcaagacctttgaaattactttaccttcttgtggagtggagatgctcagtgcctgtgagctctcggtacagcctgactgagaacaagcagtcagagttactttatagctgtggaagggacacagtcctgtcaatatgcctagtatgaaagggggtacacaaaaggtttctatgtttgctggaatgtctactaagaacttcttgtaagtatcagagggagcagagtgagaaagaaacagagaaaaggaaaaaggcacagagggatacagagtcagagacagagagatgcaaaagcataacccatagctttcacgtgtttcctcactggccaggtacagaagaggggaactcatgaacaaaagcatggcacccactcattgccatgacaacactaaaaagtgtctgatgctcatgatgcagagagctccacacctatacagtgcttcatttcacgacctgcacctcccacagaaacaaaacgattcaatttgcttgaacctggcattttcaagcatatttaactgaggagcccttgtagagtgtttattaacacactttagaaaatgctcctcccaagaggggctccattatttcaatggtaggatacactgagacaaactgtttgtgtggcaggcaagaagtatgcaaattcacacaatggaacaattagcaaattggataattatgcttttgtacttgtacttgtgaaattattagtttatttaattaagacacctgtctcaaatgggcgcatcacatggggaggtattgaattaaccaggcttcacgggagacatgtaagatttgttcagtaattgaaagtgcccataaacatgataagatcctttgtctactgatgtccatagcccaggagaagctctttactaggtgaatcctatgagctaaagaagtctcagacatataacgcaggcatcttctctggttttctctcaatgaacaatcttcgatccaaatggtagactgttatcattcttccagagaaggcagcccctctttttgtaatccctcattgattaagccttcaataacccagagaatacagtattgtctctaagtagcaatactggtgagagagttcaccctttgaacactttatgatttgtgtttatgcattcatatgtgtgtgtatctgtgtttgtgcatgtggatgtgcatgtgtgtacatgtgtgcacatgtggtttgtgtgtgcatgtatgcttgtgtatgtatgtgtgtgcttgtgtgtttgtgcatgtatgtgtgtgcatgtgtgtttgtgtatgtatgtgtgtgcatgtgtgttggtgcatgtatgtgtatgcatgtgtgtttgtgtatgtatgtgtgtgaatgtgtacttgtgtatgtatgtgtgtgcttgtgtgcttgtgtatgtatgtgtgtgcttgtgtgtttgtgcatgtatgtgtgtgcatgtatgcttgtgtatgtatgtgtgtgcatgtgtgtttgtgcatgtatgtgtgtgcatgtgtgtttgtgtatgtatgtgtgtgaatgtgtgcttgtgtatgtatgtgtgtgaatgtgtgcttgtgtatgtatgtgtgtgcatgtatgcttgtgtatgtatgtgtgtgcttgtttgtgtatgtatgtgtgtgaatgtatgcttgtgtatgtatgtgcgtgcatgtgtgtttgtgtatgtatgtgtgtgcatgtatgcttgtgtatgtatgtgcgtgcatgtatgtttgtgtatgtatgtgtgtgcatgtgtgcttgtgtatgtatgtgtgtacttgtgaaggtcagatgtcttctcagtgtccataccttggcttttgagaaaaaagtttctcatttccctggaacttgccaactaggttgagctgcctggccagtgagcctcagaaggcctcctgtctctctctcaccagcaggggatcacaatcacgcgccactgctgagtcatctcctcagcctgactcaagtacaaatgtccacaggtgtgcactgtatttgtcctcccctggaacagaggatcaatgactgggaagacggagaagaagggtgagcaaagacagaaagctgcggtttgcctttgcaccccacccttgcccatgaccctcagtgctcccctctgctcttcatttcagtggccgcagagatacctcctcctctcagtttgtggccaaaagcagcaagctaatgagcattcttcaagcatgtgtgcaaacacacacacatacacacaccataccacgtgttggggtcttcctaactttgaacctactttgtggcacaaccccaacttcccgctttccctcaatcctgccattgggactgtcatttcctcttgcatatttcagtatctacgacctgtattgtgagttctgtattttcaagaagttgactctcatcctatccatgctaacacaacgtcacattcatccatgtcatgcatcaccttgccatacagctgctcaggttaggacgcctgggcacaaagcctgatgaactgcatgggcccgagaaagctgtccagacctctgtggcttagtcttctgctatctacatggataataatctgtcttgaagaaggggccacaagagtggtgtgtgtggtgggatagtgcaatatttacctcaaaactttactgtcactcatgtaccacccccagcacacagctatttgtagagagaatgccagcgtagaatcgttttagtctaacacatgctatgactacagctcctgcctccattgcctctggaagacttcaatcattctgagacaaatgattgtctaaaatcccaaaccaagtcatcccctgaacgtattggtcatgggttccctcttcggccctggtgccactggagtgcccacagtggtttcacttcggacagcttgtttcttccttgattccagagtcattcaagggcctgctgctttgctggactggctcctcaagtgtctttctctttttggactttgctagtttatcagggctcgtcatggagagagactcataatccacatactttctcattgcaccagtgtgctggccctgcactcccacctgcaggctgagcatcctcaagcggcatcccatgggcaagctccactcagtcttctccagtccactgacggcacagacacatttgcccatttctttctcttcgagtgcttgggatggtgcccggatgtaagcgcaccacgcaactgctgtatcacagaactgtacctctgagtctctatttccctatttttcaaagaattatttttcttttaaattatgtttctacatgtgtttctgcatggggatatgttcacatgtgttcaggtgcctgtggaggccagatgaaggggtctgattctttgaggatggagttgtaggctgttgtgagtcacacccaacatacaggctctgggaaccgaactaggcaagatcagtatgtggtcttaacccccaaaccgtatttctagccctatgctttcatgggttcatagggtgtgtacattgtaggctatgtatgtttgcatatatgtgcatggtataagcacctatttgtttgaatttgtgtggaagccagaatttgttttgaggcattttagtctatcatttttagcctaatctatggagctttctgactctgctagtgtagccaaccaggttgcctttcaggataccattcctacctcctgaccaccgagatcacacacaggtgggctgctatacctgcccgtattttcctgggtgctagggatctgaactcaggtcctaataggcacgctgtgagctcttctcccatggagccacccctccattttcctcgctcctacttccccatttttcagtacctctatcatgatacacaaattctagtctcaaaatgaaaacgtcaccataaaatatgtcttggcacttgtagctttacaacatttctgactcatctttcctgttgggaagtgcagctctattgggagtgtacataggggataacttacatggatgaattagaataatgccaagccaaaaggaagtgagtcagaccccagaaaatgcaagttttattgccaacatgagcaaggcatgctggggcgagaagctacatgtgcatgacataaatcatgtagcatgtgacaagagcagtctctcacagatgggtaccattagtggagacatggggacgttgactcagaaaagacatgaagttgtatcttggttggtgatataaaacccttcctaggaatgtctttcaggaattaaggtaccatcatcacgggggccggcagatacctgaccttacacaaggatacattgaggagttatgtctcctcagatcctaactgaggtgtcatggtggaacctcagccatttctatcagctcttccagaaaggttcacacaatcagggaggattacatgaaacctgaactaaatggcaccccaatgctttgctaggcctagcttctttcccttgaacaagtctctgcatagatgtcgttctagctgcattctattgccgtgacaaacactgtgaccaaaagcttgtcagggggagaatggtttattccaaagcacaggtcacagtccatcattgactaaagtcagggcaggaacttaaaccatggagggaagacagctgcatgctgggtaaggctggatcgtgattaactagctttcttatacagcagcaccaccactgccaccactctgccactgcccagggaatagtgctctccacagtgggatgggtcctcccacatgaattagcaactaagacaatccccatcagatgtgctcacaggccaaactgatttaggcaattcctccatcaaggctttcatttccggtggctttaagctgagtcaagttgacaactgaggctaagcagaacatacatgtatcatgagagtcctccagtgagcctcctctttacttaagggcctcaccacacagcggtaaattttccataaagtgggcagacatgagaatttagaagattacacacactattccagggttagaggaggcctattaaactaaagaaaaaaaatttgaaggatggtcacttttaacctctcagcaaaatactttctccagctttatgcttggccagagaggtttaccaagttgtgttatatttcccagaaaagtctggagaccctaaaggactgtggagagaaactagctcaatcttcaggccatttatcaaagcatggaggtttcctgtttcaagcaggtagagcaataatacacaccaagaaaggaagctacagagtggagaacagggagcaaaagaagagaggggaaaagagctgaagtcgggggctttgccagctctggatccctagtggaaagtttgcatgatttctaaatcacacttttaaaaaatgtgctacccttttctaggttggagcgcatttctttcctagctccaagggggatttgcccattacattgcatctccaagatgcaaagtgtctgtcaaagtgtctaaataattttctccaaatatagactagggacttcagaaagaggcatagggtgagtattcagtgcttcctgccttcgtctctggttatcgttaagcatgaagtcacaaagagagactgcccattcatgttgccatcctactgtctgggacaggtggttgattgcttttgctccagtatgaggaacttacctgaatgaattaaagttgatgcctataaaaagttgtgctatctacaaaggcaaaatgcttctccagtctaaagtagcccatcttgaacacagcctcgttgatccttaagtgatttcccaagttgtgcttggagtgtcaatgtaaatacttattatattgtctccagagaaaagcatagtgctatcctaataatctaccttcaaaaattacttgtcaacatttcttctttcagcctctagctgactgagaagataacttatttttataacatgtttgctatgagagatgttgaaactagcaggactatagtgatggtagccatgcacagattcatgcagaaggagactgtccatagacatgctgcatacactgagggatttgtgtgatctagacctgtgagtgtaagaagataggacctgccctggtttcttatggcgatagcacactctgaccaaaggcaaattagggatggaaagggtttttttttttttaagcttgcacttccaggtcacagtctaccatggaaagaagtcaaggaatgaactcaaggcaagaacttgaaggtaggcctacttgctattctgtatagacatccaacaaactcacttcacagccaaagaagtaccgaaggaacagaaatgatgccctgtgctagctgctttgcaggccaacttacacttatactagcattcttaaggagtccactaccacctgcttaggaactatactgcccacagtgggcgtagctgtccaatgtcaattaacaatcaaagcaacccccacaggccaatgtgatttagacaattcttcaattgagactactctctcagatgcatctaggctgttgagtagacagttagacattagcagggcaggaagcctttaagtcaaggcaaatttgtcaaggacaattacaaagaggttgttttggtattgtcatttaacaaacagagtaccgtagagtaagacagagttaaaaagatttacagacagaaacatgcatctccagagaaatgggatagctctttatgacaacaagcacaatgatctcaaggtaggtttaggtggacgtccttgcaggggacaacactgggacatcattttcattttgagtgtcccactcactaggcaggcaagtgacctctcaagcttcctttcagccaggaaactctgtgaaatcagaaaatggccccaagcatgtcagaagcctgccagtctttcttgataatggaggaagacaagccgaagtggcattcaataagcataaagccagcattattgatgtcttaaaagtgtgagtgtcccaggaagctcggggcatctgtgtgtggatccggattgctaagccccagcagggccctgactctcactctaagcgataatgcactgtgcattaatgcctggcattgagatgtcctgacatacacaccaggggactgtgaagtcaagtagagtctcttcaaagcccaagctctcggagaagggtggggacttggtttaagggaaaggcgagtattcaggtagggagaaacttaagaccccttctgtatatgactctgtggagactcgcccatgagagcttatgaacaaagaagctgaagtgtcaaagtccctacgaatggctcccaagtcagcgagcgcagaggccatgtccatctacttctgcataagcctcttgctgctgttggtattgtctctgctggtaggcacacaagcatgagagcttgagttcaagccccagaactctgtcagcacccccaaacaaaacagatctggagacagaccttgtaatcctagagctggggggatgggaatagcgaatcctcgaggctcactggcttgccagttgagcctactttgctaacaccagaacagttagagatcctgtctgaagaaagacagtacctaagacaggtaacgtaatcctctagcctgcacatatacacactgtacccatgtacacacacacacacacacacacacacacacacacacacacacacacacacacacacacacacagccatacagacgcacacattatagcttactcaaagtggccacttgctggttcactgcgccggggcactttcctcccggctcatcaccaatggtccctacactgtgtcttttgactaatcaagcatctccaacatcaatttgaccaaaatctctcttttctttgctctcacctcagacttcacagtagtcaaagagaaacatgaatgactggaggcagcctgacccttagaataaaattcttgaggggctggcacaggctgtgcaggctgctctgcctctaataggagcccacacactgagaaacaggagaacaggggaggtggcattgacagtgagattttatgattagctttttgactaaatgtctgcaagtacaaatgcactgccagaaaaataaatgaaaccaaggcaagatggcagcattctggagaagagatggaggcctgagcttctatttccatctttcagcctgactcctctccctcccccacccacccccagctgccaagctaggtgtttggctagcatccactgtaatctgttctccttcattatgctaatctgtgggcggaaagattcctgtcatcttcgaatggcttgtacagcaacggtaaacaccttggcctgtctgtaattggacaggtgtctgcattgatgtcacccagcttttaattcaattaaagacctggctgctctgctctcattacccactcctttctgttgcatttttagtctggtggtggaatctgtagatggcattgtctaccccaagtctgaagccagtggactccctgcaaggatcatgcatgatgcttcagatggggttgtttgcatgttatgagaggcaatgagaacattattgagagcttatatactctctctctctctctctctctctctctctctctctctctctctctctcccagccctccctctgatgtcttctattcctggccataataaggagctgacacagctacagaaaagctgtcccttacttcctgtccctgggggctttcctccatctcctgagaactctgccaagagccacactctgatttatttgctggcatctcacatttggatcaaggatgtgagggtgggccagaacatggctcttattaagagggccatctggtaagggacaccacataggctgagccgctcatcactagggacacaatggaagaggctgagacggggagaagacagggggacagtttttgcctcaagatgctgccatggtgctgagaaattctaattctcaagtgtacactggagccagccgggtagacggattggagggagtgagtcaatccagcacgccacactttttgcacactataaatgtgcccttggaaacaaagttctaacacagacattttgacacattgaccccaagaaactatataatgacatttgttaagtatggatgataatctactagtctaggagaggcatctggaaatgtccgcagagacttcaacttcctttagttgccagtatttgtgatggaggaatggctgctactgtgggtttcagtagcactttaacaataagctgaggagaaaacagggctgctgaatgctcagccttcactggggcatttgcatcgcctcttccaaggctcagggacttttgttgaaaaatcactactacatatacagtaaatacaggctaataaaacataaaaataagatcctatagtatttacaaagtaaagtcattcttaaatttacgtgaatgatggaatagccacagcacttcctcccactgaggccggttctttgaaagtgttaaactccatctttttagcagtcaatctctttcaaatgaactctgtggcctagtttgaaacttctgctggagagcataggagatcgcccaccttggatccaagactgtgcagatttcgatgtttccaagtaggaaagaataactatttcctttataaactatagggcctaatcccagacttagggaacggtttaagcagagatttgaattgccctcagagcactacccatgatgctttcctcagcaggcttagagctaacctcaacattctaatcaatgcttgcttctcggtaagaacctcaggctctgtcatcttaactctaaggaagtttgaagccacaggctcagttaactccttatgtcacagaaagggcaggtgctgagctgagtacaatgtccaagaaataactgctatgactcagcgggaggcaggacggaatttaagggaagccatttctgctgagcactgtcccatcagctagttcacagtccaaaggaatcacctgtttctcagaagggctgtgatgtgcagagaaacataaagtgctcataagccaaggtcacaccgttgttggtttctgacctttgttatcccacatgacctaagaccatcctagagggtggaaagcatcattaaaaacgttgcacttttcatagcaattacttcatttaaaatgcaccttaagatgtgttcagagattcaaccttactgcaaaaacgcacctacaaagagtgacttctctttcaaaccagttgaggacactccttaagaaagacaactgactcataagtgtgtgtgtgtgtgtgtgtgtgtgtgtgtgtgtgtgtgtgtgtgtgtgtgtgtggtgtgtttttatgtatatcaaatgttggtagctttctgattcattccaaacataatataattacaaaaagataaatagtaaaaacagattatttggagggacttccttttctttatcaaaaatgatatgaatgataatcctaatgtgtatatataaacacacacacatacatatatacatacacacacacacacacacacacacacacacacacacacacacacatatatatatatatatatataatgttatgagcatatagaaatatcttattgctgatcactggacagcagaatttaaatattttcttcattttcaaccatgctatgtgttacactaaattgaaatccaaacacttataatggaaattgttactttgcatgctcagatgaattacttgttaaaagaaaaacagaaaactgaacagcagactgcctcatagtgtcttcttcaggagtaagtctccaggcacattacgcagtcaggggaacagacaaagctcttaactcatcaacactgcccgccctaatgcaattcttctacattagtgaagcaggaacattacatcacttctatttttacaatttctgtcatagggccgtatttttgtcctctgcaaatcttcagaccaatttctctcaagatttatatttaaagaaatagtttgtaataaactacaaataaatttatggagtactataaaactggcacagagttgctcaaaattcatctgtgaacaatcacattaaaatgaatttcttttttctttccttcccgtttgctgatggtggcagagaccaccagttgacctcttagtatatattatacaccttttcctcaacaaaataaaaagctttctttctactagataaatgactacctggattaaggtcagcctttcccagaagtccacatagccactgaattttgatcgcagtagtcacccaagacagaccaacccttaaaacgcatcttataaaaaaccatgtagatctttccatagctgttccaagatttgctgtgtggaatcacacaggagagatggagcccaagcagccattttggaacatgaagccaaagaccagaccccaaagaaggcagagcaaaatgaagaagtgagtgtattgctggagaatgacagccacctctctgcatccactaacttgggacacccattaccagagaggagcctccctgtgggttagctcatttctctattttttaactggctgacaaagataaaccatcactcaggctttctatgtaaaaccttctttctcctacctagcgtttcactgtatttcggtgctttctggtggtctagcctggaatgtagtagctgaattattgtactttcacctataaaataatggatctcatcatggtatttcccccaaagatttatatgtgtttcacatactgagcccctcagcatgtactcattcccttttccctcctacagcgcccgtccgctctcaaacagactcttttctactctcaatctgaagggaaaactccatcgtacgcacagaacacatttctttattcactcagctgctgaaggactagcaccgtggtcaccactgatgagcaaatgcatgagcagtatgctgctttagagcacacgggcacattccagggagacacagccgctaaagacggccactcggtgactctacttttctattattattggttgtttctgagacagctctacagtgagtccacagtggctgcactaggttatatccccaccagcagagtaggaaggtggcttttccttccacagctttgccagtgattgttctctctctctctctctctctctctctctctctctctctctctctctctctgatatgacagccattctggcaggagtgagttggaatcttaaatcaatgttagcctgtatttcttcttatgtgaacattttcccacatttttattggtcactttgcatttcttctcttaacaattctgtgtcaaattcatttgcccatgtattgattggataatctctttggtattttcattatttagtttagttcttcatatattctggatcctggccctctgacagacgtatagacataaaagttatgcaaactattagttgccacaatggttatgtgtttcaaactcaatgaatattttctgctatgtatgtttatcatcaggtgttgctgtaaggcaggcctctattatgttaaattgcaaatgttcaatttgtgaatttcattaggaagtagaaatgttgaaaccattatttagaaccttttcatctaccattaattttcggccagggagaaaatatgcatcaaactccaaatatatgtttacatcgagactgactccatgagtcatttcataagaaagtttttgagaactttaagtctgattaaattctactaaggaacagtagttcaatccttagcccaagacagcctgatgtaatgtacaatagtaacttcacattaactaagagttagtagcagaccctccataatttattcatagaaaagaagtattacacaagacctaaagtgagtagaaaatgcaatacttgctctttaagagcttatcatccaaagaagaaataaaatgcttacacaaagaacagtcatttagaaaccatgaaataaacatttgcagttgagtaaggcagaaaaaaattcacattatatagaactagaatgatctcattacagacttctcaggtaaatataatctatactgcatataagttaaatatagaatgtacatatgctcacatttacatatacccactatggtggtttgaatatgaatggcccccattggcccatatatttgggagcttgatcattaggaagtggcactgactgacttaactagaaggtatgaccttgttggaggaagtgtgtcactaagggtgggctttgggatttccattgctcaagccaggcccagcatctctctcgtcctgctgtctgtcaatccagatgcagaactcttggctcctttcaaagtactgtgtcctcctgtgtgctgttatgctttccatcataataatgaactaaatctctgaactgtaagacagacttagttaaatgttttcctttataagagttgccatggccatggtgtctctttacagcaatagaaaccttaactaagatactcacttatatgggtatatagaatagaatctccttgatcatatgatagctggatttaaggccacatcattccaaagacaggggtaacacaattatacgtccctccataacgccttctactgtccatcaagtacacagggcttagttctgggtaaccatctcattctttcttaccctgagatacttcaggtccctgtaagccttcatttctttgaagatacaccaaaataaaaaaaaatgtaagttttacttatcaatagaaggtaaacctcaaaaatagctcacccattctttccagttaaggggtagggacagtttcaggaatgggcaccgtcctttgctgatggttttgtttgatgttctttctctatgtctttgtgtctgccccaaattcaaggcacagagtcaaatattcgtgctttcaacatacgtggatacaactttactaagccaatcaaccactgcactggtttcattttgttctgaggcaaatgagctgcacgaactatttttttttttcatttcccacataaatagtcagaaacttgtgttctactgagcacctcagggtggggagtgggctgacatgacattcagagttacaccctgttccaactgatatatctgcaatacaacccaccacacctgtcagggactgacataggagaggatgtggagatactataggagccagaggaagaggacatctgctgtgagacagtgtcttctacatataacagggaggctgaacccatgtaacctcaacaataaacccgtagacaagatctcaacaatgacaataccagttaacatgccagtaaggatgggggaactctcacaaggtcctgtccctagaagaacagctataggcattaatagttgccaagagaggagccatcggtcttctccatggacaaggtgccaataggttatccaatcctaagaactcatccttaatcacaaatacatttgaccaacactaagtgagctcagtagattgaatttataaatattacatatatatatatatatatatatatatcaagagacagtgaacttgaacaggaatgggggctataggagggactggagggagatgcaagaatgagaaacgatataaaaatagcactcatctataaaattctcaaaacaaattataaataaaaataaaagagataaattcctaaatctcattttaaattaaaagtaaagaataatttcagagtcatgtgttctatttctagcctgcgtgagcggggatctgcctgctagagtaacccccagggaattctcacctccctgtgcccactatctctaaccttccctgtgagccctggccattaccaatgcagctggaacacgaggaagaaagagcatgggtaaattccagcctagcgggtaaaaaagtcactccacactgtcatgtctctacactctagtttatcctgggaggtccaggggtgctgtgcaaaagtgtgaactaagcaaagcgtagactttagatcctagcataggatcctatgaaaaaggctgtatttcagaagtcatttgggaatcactttacatgatagagttgaaccactaattattaccagaaaccatccaagggagaaaagaaatgattatagatttccaggcagcagctattttttttgtatttttttttttgtatttttttggtaaattcaactgtagagactggaaatagtttcagtgagaaaagttcttaccaattgtactatgtatttttctatataagtgtaggtttggttgtggtatctggaaaattattattgttggtccatctggtaaactatattgaataataaataagagtaaacaattattctggcaggataataataattacttagaattgaggagaaggaatccaacccttagatttttagagcaatgtaatacactaggaatattttgggagcgattttttgtttagcaattatagctttaatgtgatgccaggtgctctgctaattatactgataattaagttcatgtgctcaagcagctcaaggaaaacaataggcatgtatgtgcaaacccttggatccactcactcttggtgtgacttcagatcaggctctgcacctctcactgagcagccttggtcagaggggaaagggcgggactctggctacagctttgcatgttaacagggccaaaagggaaaatccagaaatgctacagagagctaattggagccctttgtagcaagtctacagaaataaggagcaatggctgcagagcttcctacttagaggcttcagtagagcaaatgaactctaaactctgaccttggaagggtatagagtccagccccgttggcccaaaggggcccatttgctcctaagtgtgcctattgacccttggattctccactgccggtgggattatactcattgaattctctagtggccaaacccaccaggaggatatttgaatattgtttgccctgcttgttcagttttccctgttggtatttgtgtttaatcacttgctctttgtttgacctctgccttcacgtgagtctggtcatcacaaccccctcatcccccccaaaaccactgcatttaattatctcatgcagttctctttctgattattgtctttgtttaatatttcattgtctacgcttatacagtataaagaaggcagatctatgtgtatttctttccatcctaaattttcaattttaaaactgggagggaagagatatcacaaggatttcttaatggaaatgaaatctgataattggtgtcaaatttctcctgctaactgtatttcccagtgctagctggacaagagaaattattcgttctgaaattctggtgtacaggctccattccaaacccattaaaataggcaaaagggggtagttcaaagactcctcattaggaagccacatccaataacagaggcaaatgtttagaaatatctgaaagacaagaggcaaaaggaactcagctatacatcacagagggcgaggaaaactgagttcctaatgaatgagaaaagcccctggttctcaggaccctaactcatcaacactggaggagaggagctgagatagtgaggtccttgtgaaggcaatgaaagttcccccaatagaccctgtcatccacctgtgggagtcttcattgacaccagttctctgaccagtaaaacagaaaccatggacttttcctagagctctggagcaactgaataatagaagggatggaggaaccatgtctgtctcagcgaagcaggcatggcagcagactggcttctgtcaccaaggcaagggacaattcacaaggctccacaggcaaagagcatagaaggggacagaagtggattaggctatgtcttagttagggtttctactgctgtgaagagacaccatgacatcatcaactcttataaaggaaaacatttagttggggctgacttacagtttcagagattttacattatcctcaaggaaacagtgataagcaaacatggtgctgaagaaggggctgaaagttccacaacttgatccacaggcagcttgaagtgggcctactcaagcttctcctcgaagcctactccctagtcacacacctcctccatcaaagccacacctcctaacagtgctacaccctatgggtctatggagtcattttctttcaaacgaccacaggttataactctcaaaggtctgcctcaggggatacatccatcagataggctctgtatcccagagacccacaatgttttcaaacagcgccaccagctggacaccaagtattcaaacgtatgagcccgctggggacagctcgttttacattcaacccagaatgcctgtacaatttcaaaagcaacatttgagtgtagttaaagaatttggtctctgtgaaccaagggacaagtaaaatggtaccagacatgcagatgacaattgagaatattaagagacaggtggaagtaaaagctagcaaaataagaaagttaaggaatggaaactttaagactgaaacaaaagaattaaacatcagttgggaaggtcaaatgaacagaatcaaaacctcaaaagcataaaagaaaagaaaacaaaaaacccacaaaacaattatgagacaataaccttaaatccaaaaactgtaattcagagatctatataattgcaaccatggttgaacattgtttatatttctatttctaagcaaaatacattacatgaggagttttttttgcctttgcagcaataattatataaatgagggtttcacatcccactgagatgttgaaaaactttggttcagcgatgtcactttaaatttgtctgtggtcacttgacaaattattggtagaagtagactctgtgcacacttggactagacaccaggtctttgttgttgttgatgtgttgttgtttttccagacagtgtttctctgtgaaacagctgtagctgtcctagaacttaatgtgtagactaggctggccttgaaattacagatatctgcctacctctacctccctagtgcttaaagatatataccaccacacccagctccaacacaagttctgagcaactaaaataaagggagggcaacctgggaagaaggagttaaattaaaaacttgctatttctcacaaaacgtaatgataatatacataaggccaaattttccaccaacaaaagacctaaatctggagagcaaaagaactcattataaaccagaaaattaattaatgaaaagaaacaaactcattttctgaaaatacttttcaacttaattggtaaagaaccctgcatcaggcaataaatctaaagaacctatatacacccaagatcagcattattttattcaaataaatgtgattctaaaaagcaaaattaattaagatactaaaatttcaaccaaagtcacctcagttatgccaaagatgagttactttccctactgacagcaaggcttgcttgcgtgaggatgtgtgcttctaaaagtggctgctaaccctccagtctgcctgccccgcccactgccaccaagtccagccttggcgccaaccctgccatcctcatctcactttccagtctttattttctttactttggaatcctttgccttagataattgcccaaggtgacttaaggtgctcaatacacatgctcccttccaccattgttctgtttgtgcatcagcaaagctctttgtcaaacttgaagttgtcctttttccttaagatcccatctgcacttgtccttgcctgcccatcgtggctgtgagaagagcacacatctttctgggatgagtccttagtctacactagtcagaatataaagtgagaaaaaggggcggggctagagaaatggctctgtggatgaaacaattgccatgcaagcatgaacctgagtttgaatcccctgactcacagttccggagtattggatctatgacagtaatggcaggaagcatggctgccggcagcaggcagagtgctggagctgcagtagtagctgggtattcacaagaaccaggcagggatggggctcactgggaatggagtgggtcttttaaaccttaaaactttccctcagtgacacaactcctccaacaaggacacacctcctaatccttcccaaatagtcccaccaactgggaacccagtatttcaacatatgagcttatgagggccattgtcattcaaaccaccacaaccagctagcctggtctattcaactgcaaacaatgagagactgtctcaaacaagacagaaggcaaggatcaacactggtggttgtcctctgacacctctctctctctctctctctcacacacacaatatatatatatatatatatataatataatatatatattggcctatgtgtgcctgtgtttacacacataggtgtacacacatcataacatatacaaacaagattaaaaagtaacataaatgacaaaataatcattaaaatatacccacaatctcagaacttgggaagtggagacaggagaactgctgtgagtttgatgacaacagactacatagtgatctatgtaaatgcattccaaccagtctgatatacatcatgggaccaagtcttaaaacaacaacaacaacaacaacaacaacaacacacacacatacaaacatgaacacactcacactcacatactcacacacacatgttcacacacacattcacacacacatacacacatacacacagacacacactcacacacatactcacacacacacacatacacacatacacacagatacacacacacacacacacacacactcacacacacatactcacacatacatgtacacacatacacacacattcacacacacatacacacatacacacagacacacactcacacacatacacacacacacatacacatgcacacacaccacgcatcaacacccatactatgataaaagagcgacgcttgcatcttgaaggcaaaaataaaagcaatcacacaactacaaaaataaatatgaatgaacaaaattctgttactaaaacagagaatttaaagatgaatagaaaactcagtccaaacacagaacaccaaaattagtgtgttcaagggttaaagcatacataatcttgtatgttttaaatacataaaattgtaaaaagtattaagaacaaaaagaaaagtgccaatagacgcagtgtttcaaggaaaaatggataaggttgaattaataattgagattttttaacctcttcttcaacagattgcatataggaaatgagtagctggcctgtaacctaatttccccaaaatttgtacaagttgtacttctaccagcaagcagaacacaagaattttcaactcatttcatcttagccaccactgtattttacaatgctttaaaaaacaagactttgcaaatttgggcaacaaaagtgtgaaagtaattattttaatttatatttgtttgttagaagcactatttggatatttagtagctagacttgttttgagatgtacctaaatagattccgtgtggatttttctagagcatgtgccatgatttctttctaaattatcactttacttataaagaattctcaattttgtcttacataatttagacctcccaaactttgcaatttttattttaatttgttttctacaaaaaattatattagtcgatataatgttttcatttttctatgagatatttaaattttaaagccatgttttctattgagggtaagttagtatttgttcatgttaaataggtcaacaataaataccttcttcaaataacaaatctatattcaggataagactgagtcagatattgagcatggagaagcatttccaagattctagaagatgtccccctaggggaagagcaggccagaaccagggcagggaatcagcagatgttaccatagacgtggaaatcatgggataggtcatagatttgaaaagaaggtagtggagaatgtgatttcatataaaatttgactgtgggatgatgagctagctcagcagataaacgtacttgtcaccaagtctgatgcctctgagcttgatccccaggatgctcactgtgaaacgagagaatgacctcagcatttgcactgtggtgtgtgtgctcatacaaatgcaaccaacaacaaataaatgtgattaaaagtgtaatttggtgatgtgtaggcatttggtctatacacaaaccttttaaaggggagagtaaaagcttgggatcgtgaagtaaatgtgttagaaagaaaaaatgtctcaaggagatgctcacatctacagcgacaccagtcacaaatattttcaatagaggaaacttttttctaccacatttgatgccttgacctcttggggacaaaggcttctatttgcctttctagttaaattagctataacatttccgaaggttgaaaagtgctcttcctataggcacacatattttggtttgagacttgtcagtgagttgtgtgggtgtattctcttcttcatggctagctgcactgtgaaaaattgattccctgatttgccagtcaaatggctggggctacaacccgcctccaccttgaaataattaggtttaatcagcaattttacaataaataatggttctgtgaacttgggctagtcccaaagagcaaagttttgcatgttaaaatatgcaaaatggtcagatacatatttgtgcatggatatgaatactatatgtgtgtgtatgacttacatttatatgtatacatatgtatatggttgtcaaaagatgtttatgaaatatccaaaggctgtgtatgactgttatgacctagtccttagaggaaggagagaagatgaacctcttcatggacctatattcactggaaactgtatgctttgtagaatcactctttttatcctaggtagagagatacaagactccatcacataacatggatatttccttgtttgtttgcttgcttgcttgttatttgtgtattttgagaccaagtacatctatatagcctagactagcctcatacttacaatgtaacctaggctggccttgaacccattattcttctatcttagcttcccaagggttgttcttacaggaatgtgccattatcgtgtgcttcattttgttgtttgtcactgagcaagagcacaatgtatttgggggagtacagtgtgaaaaacattttttatcccaaatcaaaacaaaggaaactgtaagatagaccctgagaaggagtcttctttaccttcgagggtgctggtgttgtccagctcaacactggcagacggtatgtggggctgagggctgtcttcactgtaggctttcagaaagtacttctccgggacacctttaaccacagtgggttcatcccaggccacctcaatgctatatccatttatgctctgggcccttaagggagttggcacactctgtggagctgggaaggaataaaggagaaagagtcagcgccggtctgaggagatgactgttcctattcctcacttttaatggcagccgtaaatcagactcgaccattagcataaatacaatttattagagttgtaacttctcagcattgatttaatatgactgcacatcttgagccattcagtttgagctatatttcaaaaccatcaaaactccatcgacataacattcttttaagttgagaccactttttccaaaaacactgaatgcatcagatgtgtttaagcaacagtcatcaggaaggaggtgcttggtaggcagacaacctgggaagggatataacgacgagctacttaggagcaaggtaattaggctgttattttattatacgcagtgagctggcacttttatgtagtcttccatgtagccaaaaaaaggaaaaaaaaatcacacatgttgtgtatggtacttgaatgactgttcccactttccaaatccaattgtcttttaagtggttttcaaaaagcagagctccagcaggtatgatatataggatccacctttaattgcatttgtggggctaagggagttggtgcctggatagttttcaaaatcagtttttgagacattctcttcagtgtatcttgggacaaaatgagaacacttataggaaccataaaagacctcgcaagctcagccctgatttcaaaaatccataacctttaactatttattagatatttacacagctctgatcagtaacaacttcatcacagctgactgcactggggacacgaagaaagagcccaaagaactgtgtggcaggatgatggatgggagacggctctaactgctcctgggcttctgagcccagtcaatggacgacggaagacagccgggtctcccacatcgaagtctcctccctgactttactgctcagaccaatacaacaggacagcttgaggggaaacggagtgaatgctaagggtggaggacacacagagaccagcgctctccatgcacttaagacactacaggcttctccagaaacaggacacacaaccaagctgccagggaagagatgagtggaaagaggctgattttattagttctgcaatgtggtgcagggcaaagatgtcactgtccaccagatggtcttctcataagggacgaagcaaaaccaactcaaaaataattaaatagtgcaattattctctagccctcgggagctgcttggtgttgcggtcagattgcaaatgtgaattcatgacataggatgtggtggtcagatcatggcggtgccttcagagctccatagagggtcaaggtggggaagtaagctttctagacacccactaaactgcctaaaagcaggcttttgtagcatattttctaagaacatggtggactattaaatgactgattctgaacttcctacccactctgaggttgagaggggtgtaaggcagtgtttaactcaactagataattatttaagtcatcttaggagattctcccatcatcctcccttgaaattctataggcattgagccttgaaaattattagtgatatatctcagcattctgcatccacaaaatgaaggtccctttaagggtgcctgggatagtaacccattattgagaaacataaaataacatcatggtgtaaaacatgtttttgaccaattagtactggctggagaaactgttttcagaaacaatagccactattaatgtgttagacttcttgacacatatttgactggtttggtggactactattatctaccaaactctctgtgacccatagctcccagtcatgctcccctcagaaagatggtgccatctcagtcacaagcacaaagctcctgttgctcaggtgtctgagatctgctctaacttctcctcattgcacctcttctgagttaaaaacattaaactaatgtgaaacttcttgcccttaagagtcatcctataatgtcattgccaccacgcacctgattctaaccaagtaggaattttgaaagcactgtctgtgagactcaagaaagttcctcccatctaatggtaccctcatgtctgtcttctgccttttgggatacaggcaactgatggaggtttctcactctgaaatagaaatgtagcacccactaaatccataaatatcttactttcttttctctgcatctaaagaggaaagaaaaaaaaaaaactgcagccagcacgcagttaactgttacgcactcaatgcagtagaatgctggtttttccacagtcattttcaaaccaaaactgtgctgcttcaagacacagtgtttatgtgcccacacacatgcatatgtgtgcacaggttatgtttgaaaactcagcagatgttacctgtgtctgtcgtacgtccccgactccaatcgcttgacacggaacctccttcatgtgaggctgtgacccgatacaggtattcttgaagggaaataagaagtagaaagcttaaaaccaacttcccacagactcacagtaggctgtcagcaagggaaaagaaagcaaatggcagacccgtagcatttaatttagagacctccacattacctgtaaagggctggagcccgctctcgtaaacactctgctggcttccccaataaaccaggatggagtcatttcccccacagttaacagttctgtcacttgacaggcatccctcctgatggactctgacagcacggctggacacagatgccaagttaacgacagtaccccgtgtaaatgcaacttccttcatgcaaccacggaaccctagcaaacagaagggattcgtgtcacgggaagggcttgggtcattaatgaccaactgttttcgtcctctgcagtcctatctctttggggagggtttagttggggacaataattaaactttcaagccttgtttgagaaatctttggtgactcttgcttttcatccgacttaatggttgtagagacatatttatagaaatcactttgaaaacctgcatacacatagataattgtgatcctccttggcacttgaacaggatttcgtctgcctatataggactatattttctaaattccttgagccaaacagtaaaattcacaaaaaatagaaagcagtctccatgtgcccagttaacactggaaaattggtatgaatcagtggtaagagccaaaacaaacaaacaaacaaacaaacaaacaaacaaacaaacaaacaatctgtgtagctgtattatttgggaagaagataaactataaggactttatttatataggacagcagcaaagagaacattgcttctgacacgaaccctgcgatcattattttgcatgcatgtggcatgtggtcccagctaaaccaccagaaaaaggcaaaacatctatgttctgccattttctctcagcctcgtcatcttgaatatacaccctgagtgtgcactgggttcacacttacactagcaaagtccatcagtcagtgtcagcaatattaatcccataaacgtcagggaattgtgtgttctaaaggctgagttggaaatactgactgccactgtcagagaacatgaaccaatgcatttctagatttcactatgtttttttttttttttttttctagagaacaagcataaacagacatctggtcagccaaggaacggcagtttctatgaacatgtattgacagacaggggccaattccatggagtttcgcaagattaataccagaaatatgcaccaaattaagatgacaaacgtgcaccttctttctgtaccacacacgtaaggtccgggtacacgattagtgttcctaaacattaaaagtggcccaattgttctcttcagtgcgtagctgatatcttattatttttttctatcatgtcaagctacagcctacttcctttataacacctttggctattattccaattccttcaggcctgactaatcaatgctgctagtgtatcttcaatagatggtagacatgaaagaagttggctgaatggaagcagaggcagcgaggctcagtataaaatgtatttgctgcaaaattgagaacccaaacattccattattaacagtcgtcatttcctgatgacacatctcacttctctgcacccagtcttctctccccataaatgagagcaaataaaaggcagctttcatgatgtgtctacgccactccaaaatcccacggtattctggggcttctggttgtcaaaacagggttctgtgggtgggacggtgatgtgtaaacatcactttttcttcacaatgcactaaaaggtctccttaaaatggttacaaagcctatgtgtgtcggggggggcagttaggtgcttgcttagaggatatgtgggcctgagttctatctctagaaacaaaattaaaatgctgagcatccacagaacttgatgggaagatcctactgctgaagacaccacagacgtggatcactgtccatggagcagctgctgactgggaagcttcctccctgttgcttaactttcatagtacatatgtacatctctaggggagaaaaagtcaccctcaaaatcaccaatctatgaactttgcaagctataataatgacagactgtgcaagataggctgatggctacaagagcgggacaatagttataggaacaaacaactgttttgatttagattcaaggcctattccagaagaagaaatccatgcctgatactgtaagtctgggccagaacccatggctgggaagctcacgggccctactactatgatttttctaaaataatacttagtatcatttctctctaatttatgactctgtccatagattggtctggctcttatatctcaccaaggcagcttctttgtgcagtgatgaatcaggcagaaactcacaactgaccaaggcacagagaaaacaatggccatggaaggctcagccataaatgggacctttatatcacaccttttacccaaggttcaggggacatcatggaaggaaaagtaggaagactatcagaggacgaggccagcatggaccatagcaaaacagcatcttctagacaggacagcacaggactgatgtacacatgaactctaacatgtatgtttgccctcagaaggcctgcacaaggtcaagctggagcacttccacacaaggagtaaggctcccatgcctccaccccttgctgagcagcgagtgaccactgatggccaatagatgagaaatccatttccttaggggtctagagcctggctggtagactgccctgcagtaaatgcggcttcacagactgcacaaattgcacttagttgagattttaaaataaaataaaaggtttccaggagatgaaaagtggacagtggatttcataggtgctagaggacaggagttggggtaaaaatgatcaaaatacattctgtgtgcataacaattccataacgattgaatacaaatactatattacagtttttttaatgatggacatttttattagtgctagtaaccccagttttggagaggtagagacatcagatacttgggggtttctggccagacaatctaaacaaccagaaagacccagggaagctaagagccctggcctcaaaataagcgaataaacaaatatataggtgtttagtacccaaggaacaaaaccaaaagttgacttctggccacaacatgcaaaggcatgcatgttcacatgcagacacaatgtgtacctggacatacatgtgcccacacatacatacccaataaaactggttatatgtgtaagttccaacttcattctgtttcactgaaaatttcaaaacttaaaaatctaatgacatggaaatcatttcaatgcatggatttttacagcccagagaggccacagatatggcaactgcctttcagttggcacatgaagggagtctggagaggcatgaaggggtttacaggtatcagctgcagaagcaaaagatctggggccccagccttcaggtggcactgctgagctctcctgcagggtcctgctgtgttttcttaggttggaaccgaccccccagaaaggatgactcagccattatttcaactctatgccaagaaacactccccaggccacttcaaatcttggatgactgtgacaatgaaaagtcgagaaaggaattcgttttcactgtggagacttcctgcctctgtacaaaacaacagaatcccactcttcttcctattccccatcaccctaacctcggaatagctagaaggtggcccacatgtctatgtagaaggatcagaaaagcagcagtggggtgtgtgatttgacagacatgcaaaatgcttactggcttgccttgctcctgcctcccaggagtctccggcagaacacacactatggcattgtgcaccttgagccagttatagctggcctggctgtgaacacttgtcctaagtgataattttaggaagacaaactcccacaatcctttgagaagtgttacaatttttagcaaattaagttgccaagaactggcaaaacagaggaaaattaatctttcattttattcgaaggacaattacattaatggctagagaaacaaaaatatcatgaatataaccacagaatagatcctgagagaaagagggtctaattagggagaatggaaaaggatgaagggaaaaagagtaggactattgagaggatcaaaagggctacattaagcaaacatgattccatttaactacactggactgcctgtaggctgtgcctgtatgtggtgaacattctttcaggtgagtatatatgcagataaaacagaccaatgtgtcttaaagtacccgagtgatgggggaggtccttctgtacatatgtttctcttattgattgataaatgaaacactgttggccaataagacaggaagacaggcaaggctaggagacaaagagaattctgggagaggtaggcagaaaaagcccgccacagagactcattatgtagatcaccaaaggagtaacaggtctgggcattctctggtaagccaagaccacatggaaatacatagatgagtagttatgggttaataattaagacacagctagccaataagaagcccagccactggtaaacagttttataattaatatagtatccatgtgtttatttggagttgaggcagttgcaggaccaggctggtgggaaagaaccaccacaacccccgagtgatactctcagagcacaggtggggggtgtcttagaacctggatttttaacaccattccagtgcacctggaaagatactgctgctgctactgatggtgatactggtgatgatgatgatgaagaaagctaatttcaattgcttactatagttcaatatactagacttcactaatttatcagtgttgaaaaacttgtggcctgggtaaaagtctcacaccaaaaagtatagtctatgtataaatgaaatatccatccccatcatagacttgtagctagcaaagttaaaactgttccctttgggtctatgtggatgctttaaatgtcagtatctgctcaccactctattcatccatgcctccaaggtcatcaattgtggtggtgttaggtatacttctaaagcctaaccctggataagtgggttattttatccaatgctgcccacctaagtgtaaacaggatggaatattctcactcacggagaactgccagattcttcctagtaccacaaagcctggaaatctagagaaggtcctgtatgaatgtaatatttttagcagctgctacatcttaagtgccttgaaaatgtcattactgtcttagaccctggttattcattaactccttgctgctactctgcccaaagtctctctagagcgctccatatattttctattcaaagtcatttaaatctttatgtacttaccaaataggcaaagtctgtttcatggaaattttaaccattcatggtgcacatattttaaaatgtacagagaatactctatatgagagcatgtttggtcacactctggaagtttctggctttccctaagtcacagaggtgaaacaacagcaaacaccaattaaaagaatcaggggcctcaccacataacccaggagggcaccaaaactgtcatccttctgcctcagcctctccagtgccaacatgatcaactgccttttaaaatatttttttttctagtaaaatacacacaaacatgacttcaatgatggggttaaatttctggtggttcttgataatcaaaacggtctaatttttcacaaatagatttggtattcaagcaaactcactgtttcagctgattttttttcctgcttaaaattcctactgaaaagtcatggatataatgagctctgatgtcagaggtttaaaaatatgacattgtgggtacttttctagttgttcattcacacatgtataaacttctattttgttttaatttcacatataatgatcaatagtcaaaaattccaaaccacatgtgttttcaaagaaaatacacatgtaatacatataaaatttatttatgtgtgtgacaattttatttgctgaagccatgtaggaatatatatatatgttgactataagtagtgtgatggaacactcttaggaacaatgtagaaaactgtctggggctgcctgagtggttaagagcactggctgctctttcagaagccctgggttcaatttccagcgtccgcatggtgtctttcaacctactataactccagttcaagagcatctgatgcccccttctgacttctaatggcattacatcatgtgatttttcaggaggcaaaatacaaacataaaaataaataagcaaatcttcaatgcacatctttttaaaaattctgtttgaacaatccaaatatatacgctggaacaaagagaacatcttcaacaaatggtgctggcataactggatgcaaacatgtagaagactacagatagacccaagcctttcgccctgcacaaaacttaagtcaaaatggataaaagacctcaacataaacccagccacaatgaacccatcagaagataaaaagggaaatacccttgaattaattggtacagaagactgcttcctgaacataacaccagtagcacagacactgagatcaacaattaataaatgggacctcctgaaactgagaagcttctgtaaggcaaaggacacagcaaacaaaacggcagcccacagactgggaaaattcaccatccgcacatctgacagagggctgatctccaaaatatacaaagaacacaagaagctagtctccaaaacaccaaataatccaattaaaaagtggggtacagaacttaatagacgattctcaatagaggaatctaaaatggctgaaagacacataagaaagtgttcaacatccttagccatcagggaaatgcaaatcaaaacaactctgagataccatcttactcctatcagaatggctaaaatcaaaaacactaatgacagtttatgctggagaggatgcggagaaacgggaatactccactgctggtgggaatgccaacttgtacagccactttggaaatcagtgtggcgactcctcaagaaaatgggaatcagtctaccacaagatccagcaattccactcctaggcatataccccaaagaagcacattcatacaacaaggatatctgttcaaccatgttcatagcagcattatttgtaatagccagaaactggaagcagcctagatgcccctcaaccaaagaatggatagagaaaatgtggtacattcacacaatggagtactactcagcaaaaaaaaacaatggaatcttgaaatttgcagaaaaatggatggaactagtagaaactattctgagtgaggtaacccaatcacaaaaagacaaacatgatatgtactcactcatatgtggattttagacatagagtaagggattaccagcctacaatccacactgccagagaaactagtaaacaaggaggaccctaaaagagacaaactttgtcccctggagaaggggaaagggtcaccatcccctgagcaaattgagagcatgggaagaggggggagggagctaaaagaatgagaagggaagaagaggaaggatgcagaggtcatgagggagcagaaaggttgagtcaggtgtagattagaagaaaggatatgtgatgggtagggttttagttgggggggtggtaggggaggacaggagggagaagtcatgtaattcttaacatgggattgtcatgtaattcaatcttgtttgtaattcaaataaagaaaaaaaaaacaaaagatacacttcagaaagtgaagacctaacttggcataggagcaaagaaactaaagacaattaatcagtaatgttatgttggtaagtacagcacaactttggacaccacttgtgttatgctcctagtggtagcaatgctaccaatgactattgaatgaggtagtcaagcaggaaaacaataagaggccggttgggatgtgctatgtctgaactttaattctttgttaactgcattaatgtaccgtgctttgctatggactacaaattgattgctgcatacattctgttgtatttgagttcatctcagaaatcatggcttagaaaactaagaaagtacacatagacacacaaaaaaattctgttagaagaaatgtctgtatgtccagtgatttttttttttttagcctaaaggcctccaagaaaaggaagggagggttagcagatattattttaataaaagtctgctgctatatttgaacatatagcacaaatgaagcctggtgggacagggccatgtccaacggtgggtgtccctgggggaaacttacctttctctagagtcaaatggctgtaggagtcttgcagctcctgtgggatcccacccacatagactggtgaattcacctgcagagtctgggctccagcctgtgagctgtgctccatgagttcattcacagcaacagataccatggagccttcctttttgattatgacggtattccagctcccatcacaataggccagtcccaaccagagatccacttgtgtaaagagaagactggattttaactggaagctcagcagcccgctcttcagctccatctgcatttcatattcagaaaagcaaagagccacatcaaaaagctacagtggcagcttggacaagagcagaaggtcagtttccctaggaagaacaagacactttccccaaagcacctggattctactttatcctaaccagggctgaagtgatggagaatgaaatagtttgcaagcttataatcaccatgaagaatgttgtattgagtcaaaaaaaaaaatgtctggagatctacaaagatgtcaccagctaacaatctaagcaacagaggagaggctaccttaaatgccctcccctgataatgagattatgactgacttaaatgccaccctatagccctcatccaacagctggtggaagtagaagcagacatcggtaggggaggacgggggggggggcacaagggtactgggtttgtcatgtaaaacaatcttgtttctaattcaaataaaaaatctgcaggaaaaaattcatacccagtagtgattatactacacagtacagtattatggaggtaccagctttttgtttaatgtagttaacagattaaatcctactaccaatgactggcaaaccggagaacagaacactatgaactatgactccatttttgagttcttacaaaatgagaaaatacaactgcatgtatcaacttaatttgggggaaattttgacaagacaataagaaaatggaatgtcaagcttgatgaagcttgttttaaatggttagtgaactcagtttcaaatttgtaacataaattttgattcagtgttccagttttgttccgagtctatagcataattgcctctgtgtgtattcctttagattaatgcaccgttttctagtgtcagcatattttacccaaattttcagtgtaaggggaaagcattcatgttttccctcaaaatgttacatgataattactttacctatcattttaaaaattttgtcctatgtgtgaaatcagctgccataattgtcgcaagtttgagctcagcatgttaaataaaacaaattaaatcttgacgggagaagaatatgtcttctacacagacatctttgtaatgcttccccagcaagcaggcattacccttcattcaattagcacaaagaccattttaaggaaacccctagaatcccactgatggcaaaggggcattctggggcactcctgcagccaagacagtgatgggtaccacagaatcagaggacaatgagccactcactccccaagagtcaaggaagatttaggggagctgggatgatggctctatggatgaaacacttgccacgcaagggtggggaccagacttgggacccctggccagatggactgcagcctcctatacttccagcgcagcacacagtcccagcactggggaggaaaaggtagaggctgcccagagcaaactggatatttggactggctgggttaagaagctctggggtcagaaagagaccctgtctcaataaataatgtagagagtaactggagaaagaaatctgacatcagccttggggttccatatgcacacatacacacgtgcactcatacaagtacacccacatatgtgttcacacccacacgtataggcacacgttcacacatgtgggaacagcacacacacacacgagattcagagtaatgtagatgcatgatagttctacaagcagggggtagatatgtgcaattgagggacattgggtttaaagaaaggttatgaatccagtgagacagaggagacacaggattgggaggcgcggagagcgttgccggtgtgtagagctagaccttggatgatttggagtgacttggaaaaagttcatatttcctttgcctgaccccaaaaagctatgatttgtactgatttattttataccaagttcaccttcttggacataggaatccttcatcagaaactgagatcagtgaaacattgaaagccattatgataagcacagctatcatggtgatcagggagtctctaagaaggagttcctaaagcaactcatgagggcatgatggccagtactagatgcgccaagcacggggaagcacactgactggtaagccgccatgtgttacgtgaatacagccagaagctgactcgggaagcagggttaccatatcccatttcaaattaatggtctgtcccactcatttctgatgtaagtatgtttgtctcaaagtgtcatcagaactcttgtctgaggacaggctgggctgcccaactctgcaacaaggaggaaaaaagaccaaagtaggccaatgtagccagcccctaagaaggcaataggatgtgacataagcaaattgttgtatcttcttatattttacctttatgattgttaattttggatactttatactgttaagttttaatcctcttttagactaaaaggggaattgtaggggaagctgtagccacgccttcttaggggctggctacaggtgtgcctgagcaggcttgtgagggcgtggtcagagtgacgtagtgtgactgaatttgcggtttcggtttctctttggtacttgctgtacaggctgctgacccaccggctggctaggtcgctctgtaagtaaggcttttccctattaaatacccttatatttctacctgactccgtattggtaatttcccactataggccaagggtgaaatcactgtgtccttcaatagcggaaggcaaactgtcccagtagacactactattgctcaccccacaacagaaaggtatctgcagtgggaaagagaaggcagaaggtgagtgtgggacacttatccatgcagagaaagcctaactgagaactcgagctgactgcctcaacttccccactctgtctctgcccagtagcctgagtaccagctgccccagctttcctactacgtctctgctgtcaccagctataataagtttaccttggcactattctttgccctttaacttgaagtcttgcccccagagacatccagctctgatcaagcctcactggaactctagctgaagaccttactgggactttgccacgagatctctgccaggggtttccagcaccagatttggtggcgttactctgtctgcctgtctgtctgtctttctgctgcccgctattcattcttttacttttacttgctatgttcttaataaaatccctcatttaaacccaaactatatccatggtagatcattcagtagactatttagaccagtgagtgaaaagtcaaggacatgttacttttaatttgactgtgctggttcacctgggagaccagcagacagccctgtgtgtgtgtaggtgaaggcattcccagggctgatcataactgctatgaagtcatccatggttcaacacactgggttaaaagtctaaacagaggggctggagagatggcttggtggttaagagcacttgatgctcttgtagaggacctggattcaattctcagatcccacatgacaactcacaaacaccagttgctccagttcctggggaattttttttttttacctcttcttgactctgggtacctgcacacatgtagtacacagacatacacacaggcaaagcacctgtggtgcatagacattcatgcaggcaaagtacccacataaacaaattaaaaaatcagaatagattattaagagatgtcaattcaattgtgggtccacaggctagttttagggtgtgtgctgttgggatcgtgtttctgaagggtacctgtttccctggcccatccctgtcttccttctatgcaccctcctcctcatccttcatggagcagaggtttctggagcaagctccagccatcatgattttctcaaaaacgccaagaccaacagagtcaagtgtctgaatccatgagtcaaaacaagccatttcctttgtatcctgtcgggtattggtcaaagtgacagaaaagcaatgactctgatatctctcactctttagtgtgacccacccgtgggagagggttcaccattgttgccaccaaaatggcaggtgaagaggcaggcttgcgaggagggtctcatgctgtagatgacactgagtttagtaattcagaaaacaccaggagaaaagtttctggaagaggtgagacataaacgtgtgaatatttgggatggatcagttaaggggagaaagtatttatgaccactgtgccatctctccagggccaccctccattttcacaacagcatccaacggaatgacaaaaataaatgcaaaaccattacacattctcattgcacttagggaaactgctcacaccaatcttcttcaccctggcaaaaacatggagattgccaatgtattatggatgaagggcatattacacagtcctgaaaatggaacacctctgtggaaaatgtgaaagatgtagaatactgtgaataaacacagattccttaataccactttcataatctcaaaatctgtaacactcattcacatatgttaatcaaagtataaaaggcaaaccaatatgaaacacaaaattatcattatagaataattctggttagagttggggaaacagaaaagaagacagaaaaggaggataattgaattctcggatggcgtgatatgctcactagcattcatcatattgtgttttaccagacactgaatgaaatatgtaaagtacattttgaaactatatcaaaagataatgaagaggtatttttcatgtatcaagaagctaaattggatttccttaattcttaacatctgttctgttttgctcaattcacaacttttagagtactaattgtcagtttaacaaattatcttaaccccatgagacatttcacaggcctgtaaaaataaagactacttgaggggaaaaaatgaaaacaaaagtgaatttaaaaaactcaactgtgtctaatactaaaacacagtttatatctttcaaagttgggcccgcaattttaaaataaattgaattaaatccattaacttacagcaagaaaatccggtccctctttgttgtgaatgaaaagaagcaatccatttagttggttggtttgaaacttcagggaaatctcaaagtcctttgcagcatgaaatgtatctgatggaagctccaggaaccctttaagacaagagagcatgtgcacccatcaacacactgcaggcactgtaagagggtgacaggagtctgggaaatgtaacaactttgtttaaaaaagaatcagtgtcaggatgacatccctccagctctctcgtggggaggggtggggtggagaggggtagtgatgagatgaatgccatatcacattgagaggaaacgagtcacacacccatgtacatccttcatgatgctgagcaccctgagggagcagtgaccagactttgggctgagacaagctaggactgccatcttcagtggaaaataaacaacatctctatcgttctgttctacacacagtctaagcactctataatcactcaactgaaagacacaggaggctgatgagggtgtttgttccatggcacactgtttcttcccagggccacgccctggggtgggaatgggggaggggtgggcacagaggcaggtgggaaggaagtgacaggtgctaccaccaccttacagttttctccagcctctgcagccatggccctagtcgccagttgtccctcagaggtctgctgaaccccagctttaaagacagacatggctcagctacatagcaagggaaatgcagatgctgagttatcttagcaatggaatctctccagcaacaattttcacagtaacctgcatgctgacatctgtcgcttgatttatacatgggcactgtgacactcacatacaaaccaacaactctggggcccaccagagatgtcactcataaacacataccatgaatcttaacagttatatttcatattcatactttgaaaattcatgtagaattctacatacacactccacaataaactcattggatcaaactgcatggaggaggttaaattagacaaagagaacaaatgtaccgctttaatttggctctagaatgtcctcaaatctttcaaaagggacataatgggagaccttttggaccaacaagggggcactagaagggaagtgtggtctctcttcattttcttttctgttcattggcaaagagtgatttcacagggccacagactcccaccaggatgtgccatctcccacaggtggtcagaaacctcgaggctgataggccatgcactggagaactgcgagccaaagttaaccttttatcttctcaagtcaacattcccagatattttgagattgtgacagaaagttgattaacgcgtgttgagttgccagccatgcctcacctgctcccaggaactgggctccttcttccaggacagatggacacccctcccagctgtgatacgtgttgacctgttcctcagaactctgccaatccaaaggcatccacatcaaagaggggctgtaactcttcataatggacacatccttgatgcagcccacaaagcctctttgtgttatctctgcgaaagtgacaggagtcagggaatgcacataattcatttgtttgcattttagatcttagcaatccattttatctgacacccaatgggaagaaacctgcaagcactcatacccaagtcccctgtggtagtttgaaataaaatgtcccctaaagggagtgacactgttaggaggtggtatggcttttttggaggaagtgtctcactgtggaggctggctttgaggttccgtatatgttcaagccatacccagtgagacagaacatttcctgttgcctacaactcggctacttctccagcaccatgtctgcctgcatgccaccatgttacaccatgatgacagaggactaaacctctgaaattgtaagtcaccccgattaaatgttttcctttacaagagtcacagacgtcatggtgtctcttcacagcaatagaaaccctgactaaaacatccccaaaactctctaacaaattatgcaaagactaccctggtagtaaatggttacaattttctgtttggctatggctcactcacaatcaatctatagaaacaactgtgtggaaaaaaacaacaaaaacaaaaactttgttttatgctattagcaagaatattacctttttaatcaacccagaaatttttattagtgtgctaaacactgttgaaagtgaggtgtagggtgggggtggaggtggggagtggggaagggaggggggctcagttggtaaagtgctgaccacagcatgaggacctggggttgggtccctaccacccactgaaagttgtagagtcccttcctcctaccactgtgagctcagggggttggggaaggcactggagggcccctgaagctcactggccaatcagaccaggcagatgatgagctttggactctgtgagagattctgtcttaaaaataaagggaaggaagtgattttaaaaagacatcaagctcctctgctggcctgaccctacagagagccctcacccagtggctgatggaggcagaggcagacacccgcagttacgcactgagctgaactctgcaacctagctgcagagagggaggaatgaagatcaaaggggtcggtaccaggctgttgaaacccaaagaaacagctggcctgtacaagggggagcacatggaccccagactgctgtctgggaggccagcaggggactgacccagacccctgaacatggatgtcaatgaggaggcctctgcactctaggaggcccctggtagtggattagtatttttcctgatgtaagaagggactttgagagccatcccatgtctcggcctggacacatggaggagggcctaggcccggcccagaatgatgtgctggactttggggaggccccattgagggacctacccagcctggggagtggagggtggatggggtgggggacagatgggaggttggggggaaggggaaggagagggagaagggattgacatgtgaagcaagcttgttcctaatttgaactaataaaaaaattacaaaaaaagacatccaatgtagagtccactgatgtccacaagtacctgagccctagtaacatatgaaaaacaaaaccaaaaatataaaaccctaagatcagtagtaagcatatgacatgtgattgttttcagtgccatgtaaattttcaatctatttatttatttgtgcttgtatatctatgtgagcacactcatgctatggtgagcatgaggaagtcagaggacaatttgtcagaattagctctctccttctatcatgtggattccaggggttgaacttgggtttcccggctagacaacaagtgcctttacctactgagccatcttcaacctttccccctgccttgtggttacctctattagtttcttttagagtgtgttttgttattgtatactagaatcagggtgtgtgtgtgtgtgtgtgtgtgtgtgtgtgtgtgtgtgtgtgtgtgtgtgtgtgtgtacttgatatatgctagagtaatctaagaggaggaatatcatttgagaaaatgccttgatagcatcggctcacagacaagcctgttctctagagtaatggttgatgtagaagggcccagcacattttgggtagtgccactcctggccaaatttccctgggacacagacaaaaaccagttgaacaagccatgaggaacaagtcagtaatcagattccaccatggtctctgctttagttcctgccttgagttcctaccctgacttctttcaatgatggtctagagctgtatgcggaaataaataaaccctctcctgccaagttgattttggtcactgtgttttatcacagcaatagaaaccttaataaagataggagcttattttaataatagctttaaaatgtattttacattcatttcatatgtatgatttaatcttctatctatatctattatatctatctatctatctatctatctatctatctatctatctatctatctatctatctgcctgactgcctgcctgtctgtctgtctgtctgtctgtctgtctatctgtctatctatccatctagctatgtcttcatatcatatgtgtgccatgactacagagcctagaagaaggtaccagttggtgaggttccatataggtgccaaaaattcaggtcctctgaaagagaaaataataaatacccttattcactgactctctctccagctccagtatcttagtcatggaactttttggattgggttgggatcttttgtctgtaacctcttttgtgactctccaacaactaatgtatttactcttatacaatatgcttggaattttcctcagacttctgagagtcaagttttctattcatgtgtcatttccaatgaattaagtcttagaaaaatatttacatacatcctgcaattatatgaacctcacttaattagtatatgtcattttggcaaaagcctaatgaatcttttgaatagcaagaactgggtattgacaaggtaaacagaactactgaaggtgttttgaaaaaggaaaggtgtaaaaattaagatgtctttagaaaatataaataatacccattcatacttttatgtactgtaattagagtgtacttagttttgagtacattatggtggttagttttaattgtcaacttgatacaacctagaatcacccagtgagagtctcaatgaatgattatctacagcagactggaatttgggctcatctgtagggacagtcttatttaaggcggtcatgtttgatgtgacccactgtgggcactgccattccctgggtttgagtccttgactgtaagagtggagaaggttagctgaatatgagcagtcatggattccctctctgctcttgaccgaatgtgaccaactgctttacgttcctaccatgacttccctgcagtgactatagcatggaacctcaaatgaacaaaccctttcttccttaaagttgtgttgctgggccatagaaataaacctggaacaatataaacctttgcttcctgtgaaactcaccgagtctcttttggaggatggtgtgaccttgtggcagcccacccacaaacagtccggtgtagcctcccatcacggtgcttccatccagagaagccgaggagcctgtgggagacaagaggggaattacagctttctcaagagactcctcagagtgaagctcatcccacatctttgtcacgcagctctcactcttgctttaacctccttgtctatcaagtgccagataagccaactgctatgagcccacatctcatcagcatcctcctctcttcctcgaccaccctggcctcttggtcagttactaacatgtaacatacagtatttttcatatcaccagggcctactgtccactgatcccttggcccgggcctgatgttcactgtttcttgacctgaaacttatttccttctagatattttcatggttcctttcctggcccctatttctctgctcaaatgttattagaaagttcttcccctgttgttgtggatcaaaactaacactcctcccaatgcacaaaccttttgggacaaaggccccatgttattagctgtgaggctcctagggaacaggctagtgactgtcacagagtgtacccagcatcctctgagggtaaagaagtctgggttttcccatttctctcagttttccatcgagtttaaagttctatcaacacagctaacatccactcctcccatttttacattcttgcagctgtttaccattttatactttgttatcgtctgtccccgcctccatataaaccacaacctctgcaaagctctgtttactttgttatctgagcacctagaacaccagtagaacgtaagaggagctccttaaaatcacttttaccctacatgaatggatgaaaacctacatcagtagatgtaaatggaagatagagctggctggaaaaagaaccacacccaaatgcaaacactggctctgtggtgacagtcctgcctaccctctgcaggaatgggaaggctaaccacatttctgagccttggttcttctcatctctgtgctgagacacctgctttccttgcttgccttctggaggaaaggggaacattagtaaaataatgaaggcccttgcaaggtgtagagaatgcatgaaatgtaggatgaaccctggtgacttcatccccatcttgccttactggagccccatctggatgagaagctcatggccagagtttaatagcagaagagcaaagagcagctaagagacagattccacagggactaatgtgaaagcagatgaagaaatcagggtgaaattcacatgtgcagatgagcatgtgagtgagagaatgaacacacacacacacacacacacacacacacacacacactcttacctgtgtactgtccatcaagagtgatttggccgaaagcctgatgcctggccacagtgatttcatgccactgcccatcactgtactgtttatcatgatcatcagctgtggtaacttccaccagagaccccttcagagaatgaatgaacaaataatgaatcaatgctcacattcagatgtcagtgacatcgtatattttttataaaccagttcacagataccagcatcatgatcccaacccaaagcatccagtctctcagatggaactggacacacaagttggcatccagtgattgctaagcccatcttgtggtatacatctgaaaaacacagtgaccaaacaggaagacttctccagaccatgactctctgacaaaggcacttgtgttttgggtacctatattcgtattttaacattcactgaggaattgtaaagaaaagaggaatttaaacctgagaaaagttgtgaatatatagtctaaggataaacaaacttcaggaaaattagcttcattaataatttcacaatatgcactgtgagaggggataggaaatgagttgcattaaaagtatttattaaatttatttgtgtaattaaatttggttttcaatgctctgtactctaaaatttagcatttatagttctgtcaggatagtaataacacagtgagaaataggttcttgagtagagaatacccagtgaatagaaagaccaaggggaaacaaacaggcaaggagaaagaagcaatgaagagaaagagtgaacagactgcctagcacttcagaacagacagcctgcctagcacattagagccatgtgaacacagtttaagcatacgaatcagactaaatcaaagaaactcgatctccattaaccaacatttactactgtgactaagaaagcagatcccttcaaacctaagaaagactaatttaataccaaggtttagttacctgagaaataataaaatatgcagttgacaagctgatggaagttcttataaaacataagcaaggttggtttaaatagtacacattttaaaaaatgggttggaattggaactaaagagatgatggcttagaggctaagagtactggctgctcttgcagaggacctgggtttgattctcagcaccaaatgggaattcataaccatgcgtaactccagtttggggctatccatctccctcttctggcctcatccagtattgcacacatagtatacatatacatgcaggcagatatccatacagacaaaatacaaagaaatatatttttcaaaacattatcaaggatgtttcagcaaattctaacgaatctgctgtattatttttcatatggtaaaaaactggtaattctttaacacgatagatttcatgtcacaacacaagtctatagtttcttataggaaatatttctgcttatatttccctaagaataggacacaaccatttcatgcatctgattggctcttgtgaagcctcatactgtacttggcatcatgcatgatgtatagaatctcatgttaccaacattaaaaacagcagcagcaacaacagccaaaaagagtttttaatttcctacaagcacaggagttgcttgtcacacggacagtaccctaacttacacagacaatctggtcagcgagacacatgaccatttccaaagttatctcgtcttagaagactgtctttctttctgtttttcttttttcactacatattcctttattttcctcaactctatttcaacattttaatattttacaaacacacatttcattatcatagtttaataattaaaaccagaactggtgtcgtgcccaattaatgtgccccggtagcatgcccattagttttttcattagtgaattcaacaatactaatgggattactagcatgggatgctaattgggtgtgacataagaaactggcttacttctgagcatacccgtgctaatgatgaaattaatgagcattttattaaacgctgtctcatcaaagtgtacttagttagcgttaaaattgttacaaacggttctgcattttaaagatcaggtgtctgaggcgaggctctgcagattttgtttggctgtaatctgcagcagggatagctcctgccatcaactcttattgactagatgcagacccactgaggtgtcctaaggcagagtgcaccaaacttgttctaagacttagaggaactctgcacagcattcttcaacgaggatgccaatatctgcataataatagttctacagtcaggcctagtattacacatgggaaacatcaggcatagcaaaataagactctgttcggaattacttgcaagtattattttcaaaggctccttgtcttctaagacaggatgttcagtgtcatttctgtgaatgtcactgagtacagaatactgaagagacaaactgggcaatcaaatgtcatctcatcaagtttacacaaaattagagtagccaaatgaaggactggaaaattatatctattttagagactcaatgaaacgacagaaattaaagtggcagttaatttctcaggtttgttctcttttaagctttattttggttaaagtgcttgtaggtgtgtgtgtgtgtgtgtgtgtgtgagagagagagagagagagagagagagagagagagagagacagagacagagacagagacagagagacagagagagacagagagacagagagacagagagacagagagacagagagacagagagagagtgcagctccctttggcatcaggagttacaaaagtcatgactctccaatgcctctgctgggggtcctctttaactgctgaaccccctctctctctattcctcatttttatctcttaacaatgattgcagcattcagttcctgatacatacatatccaattttaattatcattaagaatccctttttcttctccccaaatacttatccaacagaacatatggatacacaggagagaaatggagggttaggtgaatggcctccctctgtaggaggtacagctatgcaagcaactcagttcttgagtttaataagacattttaaaacttgaaacatgtaagagaatatgaagttattttgaaattgtattgtagtaacttcaaaattcctgaaaaacaggtaggcatggtggcacacacctctaatccccgcactcgggcagcagagcaggtggatctctatgagtccgaggccagtctggactacaaagtgagttccaggagggctaaaattgttacacagagaaaccatgttttgaaaaacaaaacaaagaaactgacaacaaagttcctgtaaaatgtccctttcacgatacaaaattaaattcctgtgagtgaattcagggacagttatttaaaagccactgcctcagcttattccgggaaaagtcaaactatccaataaactaagccagcagggactaacatgtcacagaatcattaaaagtcagaaatttcatctcagaaaatggatggtctgatttaactgtggtagagttttagtcacaattatctaacacttaaccagataatatgtcaaaagtgtttattatgcatctatattttcctaagaattgggttaaggataaaggagtctcactgggtgacattccaattagaaaaaagacacattaagcacataattaccagtgtggtaggaatgatacacagttcactaggtaaccttgtcttaatttacagagaaaagggaaaaatgacttaaagtgatgctccaagtacttaaaacgcacataattgcaatgtcaccatgtcactatcaggtgcataaagcaaatgtgtctacttcttcaaatgtggggtatctagcttcacatgcaaatctatattcaggtttctatcccaacgtgagaacaaataagaggagactgctcaaaatttcctctatttggcagttgcaatgactgtctaaaaataagcagggccttcattctgtggtgagcagacacgtccagttaacctgcagtaggtatgaacccctttggcaggaggtgagggcacagcccacgctagctggtgctctctgcttcatggattgcctcctggcctgggaccacttagtataatagatctgattatgtcttctcaaatacactccaggcaagcctgctcaaccaatacctgacttttttcaaaagtaaatcaactgtcagtgtcccgaaagcaggcagctttgcctcacacagagtgatgagtattccagacagaaatgtgcttacatggcaccacagagcaccgcttcctggccccagcttcccacttttgccagcgcagttttcggttggcctctaccaactcagtatacacttaggatccagctatacaggcaggggtggagcagctgggaaagctgctagcagaaagggtgagctctggtgagagaggaggcaagacagcagaagtgatgggaagtgtctctgccccgtgacttgttcccatctgtctatccaatgagactcccaagagcttcctggcagcatcaacagaatcatgacagtcctgtggctgagtggggagaggcattgcttggccctgttatcccctccagtgcagtcttcaaggtccccacacttatgaaagagagcagaactcatatcaaaagagatggggtgttgacattcggatctagagacatcaggtcttcattctccaaatgctttgcctcgtatgtttaaggttgtgggttcatctgtaagtacatttactgaagactcaatctgggagggccatcaacagttcttgggaatggtgtactgcacactgtcctttctcatgtttgtgttccaggagcctccagttctctttttttctaaggttttggtgtgtgtgtgtgtgtgtgtgtgtgtgtgtgtgtgtgtgtgtgtgtgtgtgtgttgtatacatgtgtgagtacagacacatatatatgcaggcacacttgtggagactatagctcaaagttcagtatcatcttcctctatcgtatccatcttgtattttgagacagggctgtagtatgagttctacataatacttaataataaaatcccagagtcagatagagggttaaatgctgaaaggtcagagagataaaggagcagaccacaggcacaccttacctcctcaatttcccagcctcaaagagactgagctcctgtctcctcccgcctatcacttcctctctctgtccagccatatcacttcctgtctatctgtacagacctccagatctccatggttaactagtggctagctctgccctctgatcttcaggcaagctttatttgttaaagtgtcaacaagatgtcaccacacaggatctctccctgaacctggagtacagactttgctaggctggctggccaatgagcttcaagcatcctcgtgtctctatctccccagtggcccctgccacattggccttttttgtgtatgctggggtccaaaatcaagtccttcatttacatagcaaatgtttcactccaggagccttcttcttagccctaaaagttcttaaccaagttgttcaggaaaacaaaaagttgccctcaacaccatttctctcacttgatctgaaacagctggtttaacttaggaaggaaattttggtgacctcaagaatgagctgcagtccctaaagagagcccctgcccacgtgagagctctgcaggttagtgctggaaggaccaaggcgctatcccatctggcttctcaaatatccccagacagaaacagtgtatgctgtgggggcagaggcgggtttttgccctcattaatactcccccaactgctgctgctcacttgcactgttccccccgtattacttttgctattgtggtggtttatttatttgttttgtggaattttgcaattgagcatttggtttctttgttcaccgtgtttatctgtgtgttctctcaacttttgtttagtgatcaaactctatcaatatgatggagttcgtgaccccctccttagaagcaggaacttaaaaacatgattcctgtcactcctctggtccactacagctggttttatttgttgagtattcttttccttggctatggcgttcactttgtccttgctttgatactcttgcatttcaaagattgtctgtatttgtaaagcccatgactcatcatgcactgtcatgggacactcagtgttgagttaaagaggtgatgtttctcctctaccctggctctctttggggcattttagacactcttcacagaaaggttcagatgcctttctgacacagacttcatatgctttcctaagtttctgaacatgtcctcagcatccttgtttgctgatcgaaagaagcaatgaaggaatgctaaaccatcctggagacagctctactcttcctgctgtcttttgagagcctgtagcctgggttaattttgaactcctggccatcctcctgcctcagtctcttcccaagttataggagtgtctccctccctggctttagacctagattgcatggtttaaaattctgccacttagtggctcagaacgaacacctgggaaatgggacacaaaggtgccccacctcatccatgtgtcagtgagtgggtgtagacgcacagagctctgggtagagagaatggatatcacaacgccaggcacagggctcatctgcagaatcttgactgggattcgctggggtttttcaatagatttctaataggttctctataaacacagacacatttaatgctgtattatttttatcttctccctccttttcttgttctggaactttctccaacattatgttcttctcatctatgcctcaaaaatacctcttctctaattaatctccttaaagttttcaaagggaaaaaataacattttcagttctgtaattgaatcagacttagcgttctgatgtctgtctacagctaccatctgccctgcctgcagccccgccccctctggctattgggattgttggtgatggtgacactattatccacttaatttctatctatcagcatccaataagatgccgaagttccaggtgggggtcatccggtagtccttgtgaaaaaggccacctaattccccagccaaggacctatcaggccactttgaagacactgagaacaaaccttttctgccacatcctcaggtcccagctttgcaaagcatgaagctcttcacatgcctgttcaggagcctggaatgatcctcagaccttgatccaaaggtctggttctctgcctcttacaaagccaccgggtgtctgagccccaggtctctcctctaggtcactggttgtctgactacaggtctccctctgaggttaccaggtatcagagcccaggttctccccacaaagctacctggtgtctgagccccaggtctcacctcaaggtaactgggtgtccaggttataagagtctaaaaccatcacccatggctcttagtccagggtcctaagcacagcttggacacagagggggaaatccacaccagttttgacaccatcacacaaggcgtccatgtagaagctctgtgtatgactttagtcacgggttagagggatgactgaacaaagtaaaatgtcttattctatcactttcaggctagatatgtcaaatggtcaccaaaacttcctaactgatgagaagacatctttccagtggtttctcaaggttgtatgaacagtcaacacctgagggagagggctcttccatggagaggcctgcaacttaggcagagacattctacagatgtggcatttgtaaatcatgtcccacactcagagagatgtagctggttgaaagccatccattctcctttaagtaacccccagaaactcactggttcacacagcacaactcactggatcatttctgaagtctaccagtggtgtcccatctgggcaaacaaacatttgctcacttcttccaaaagagtctctctctctctctctctctctctctctctctctctctctctctctctctctctctctcacacacacacacacacacacacacagcaattcagtattgtgttttctcagactgacaactcaggcctaaaaaacattccattttatgctcatgtgatctcaaagatggttttctaaatactcataaagcagtttaaattaattattttaatacatactttccaggttgctactcagggctacaaccacatttaactttaaaacaataggtgtatgaaacatgaagttaaacagtacttaaaagctacttaaatatttgctggtgaaatagttaagcttgaaagccaaggaggaagagaggcagatatgagagagaacaaactcattatttgttctctgaagaaaaggtaaatccgttcaaattcattggtttattttgtacccgggttggcctgcaattcactacataccaaggctagcctcccaatcacagcactacaccaggcccagcctctgaagtacagggttccaggcatttaccaccatgcccactatccatttggaatcatcataaggtagtttactgattttcagcacatagctttgtagagtagactgggttggggaaaagcgctgctatttttactgtggggagtcatttccattttgtaattttcatgttcctcaccagtaggatgtagtggttctcagcctgtgggttgtgacccctctaggggtcacctgcatatcagatacctacataactactcataacagtatcaaagttacagctatgaagtagcagtgaaatcattttatggttgggggtcaccacgacctgagcaactgtgttaaagggctgcagcgctgggaaggttgagaaccactgatgtagattaagaaactctgttgcacacctctcaagtttcagatgaaggttctccatgaacatctgtgtacttacctcagtacctggtaactacctgggagtctcagaaatgttaaccaccatggctagtaatttacctggggattggaaagaaaatatggacggccattcttcagctgaagggcaaaatactcttcctggctgtcaggggacactgcgaggacaatcagaccttcaggcatccttgtctggaagctggccttgatgcctagagatgcaagtggcattggtaagtcacggctgtagttttgttgattctttctgataaatgtacatttactttcattattatttatgatgcagtgaatatagtcaggaaattatacacagcaatttgctgggataggcccagtcaatgggtttaaatatatcctgtgttaaaggctcagtagcacttggacattttgttaccctcatgttaatcaatataaaatgaggtttggatatgtgcaaaaaatcatgcatctggaaagacatgccaaacccaaaactggatacttagtaacatcagtctgaagatattatcagagggtcctaaaagtaaatgacttcttgacataaatgaaaaactcaaaaggggctttttaaaaatcctatggaaatgacagaatcaattcagtaacagacgctaagacaaaacacccggatgagctggcctcttggagctgcctgagtcagcgcatggtggcagccttcagaattgctgtcttcagcccccctccccattcactactcttgtctcacagggatttgcagctcaggggatgggggagtttgcaatgtttccctcacactgctaggactcatcagcaccatctccagtcttgggatcccacttatacagcacctgtgcagagggtatctagctcaaggtgctgaaactggcagtcaagtctaagtaccacggcgtctgctctgagacttcccagtctcactggaaatgtaaaattaacagagcagactgtgagaataaagagatcaacaacacacctgaaaatcaaacaaaagctaaaacacaataataaataatgaatgaattctgatttgagcagtaatacacaataggccaggattagaaacacttgaaaaaaatctctctttaggctgggctaataactgaagggccttcgggggtatgtgaatttcactctgttgctttgaaaaacaccaaacaccatggcccaaagcatcttaagtgtgtgtgttgggctgggtgggggagctgggtattttttgaatttacaggttgcaatcgattattgaaggaagtcagagcaggaactcaggcaggagcacaggcttagagcagaaacaggagaggaactgtttgccggctctctcccagactcttgggaggctagctttcttatacagcccaggtccacttgctcagggattggtgccacccacagtgagctggctcctctgccatcaattaacaataagggccatcgtgtctactttgtccagttatgttcacaggaccatgtgatctggcaagtccctcaatggacacactcttctcaactgtctctgcacactctagactgtgccaagttcactgagctttggtttagtgtaactctctcaggagccatgtctggtccaccttcccagctccattctctacaatagtgcatagacgtatttcataaatatactgagattttaggtaaagagcagggagatgggaggtttggcctgaccattaggttttgatcttctcttttgctctcaaatactatgagtaaaatgattgctttcaagataaatagctcaaggacattggataaaaatagctgtaattcaggacacgaagggtgtctgttccctactgatgggcaggatggcagctccagagtggctgcagagattatgggagtcagggtttgagtgacttaagagggaaacagttatccaatctgagtacactattgcctataatttgagaaacctgggcaatgaaaaataggcaaggatcatgggaatatttaaatgtttaagaagcactttggaatattttaatttttatacaccatccaaagtgtacaaatgcatgtgtttctcaaaacataataatttgcaagccttctagaacgaagaggtgccttttagatcaacaaagacataaagctgtacacagaggaaagtgtctcctatgaagggaagaggcagtgcaagaaagagtgtcttgatttgatggtgtcagctactctctctcaatcttgacatctttctcctccatgttaccaacataaatagaaagtgatattccttctcctagactctaggaggaaaatgaaaacttacaattttgttgaagcatattcttaataattagattactacaactttccatatagacaaatcctagcatttgagccaaatgcttgcttcctataatcaattatttaaatgaagtaaactcacaagtaaatatatgtaaaaatacacataataaaagtttgatggatgtatgaaataaagaaaatgttattgaatttacaatgagatagaatggttaaatgcacaattattcaaaataattaacaccctcgtttccccaaagagacccacttatttacagattcccaagtgctgacttaggctcagtcacgtgaccttcattggccaaaggaatggaagcagatatgaggccccttgtgggcctcactcccctctgcctcacaaacgtttccatcttgggtccaagagaaagaaaacttgtggaccacagccaaaaaagtgccccaacaacttcactgtagacgattgcacgaagctgccctgctgactccaacaggcagcagagggaataacaccttccagcttcataaaacggagacctgaatttttcaaaggcaagacaaagaagatatgagctaaatgacaccatatatatctagggacaagagaaatactacagtgtttatattgtctctaaatttgtgcattcatttaggaaatatttaaggaaacaaaattcagtggccactgttccaggctagtgggacaagtgtcggaatgtatgtccagtgattatatttgtgtatgtatgtatgtgtatatatatatgtatatatacaatataacaataaataaaaatacatgaaataaaacacagtatgtataagactacacaaatgccaaattcataggcaagtatatggagtgtaaagtccaactcagatgagggctaccaagacactacctgtggatacaagggtagatgtttagaatgcagctgggaattaatcttcttaaggaatgtggtgacagtaggctatcctcaagggtccatgacctcaccaaccacagtgttggctaggtttgcagtgccaagcatggatttcctcttactaagggggacttaagttcaattagatgtctatgggttacccctgtagggagtccacccccagttaatcatctatataacacaaccctgcacctaaggaaacatcacaaaagggacagaaagatcataagtaccagaggacaaggaagtctgctatgaaatagtgtcttccaagaacgtcaggagctgcacttgtgaaattttaataacagacatgcactatgtcggtatcagttgagattctaacatgcatcatgtatggaaaaatctcacaaggccccacccccagactaagaactgcaaagagtctcccaatagtgtgtctgatgccagggatcagccttaaagatgtacacatactggcaacatgaagtggagacagcagaatatgtatatatatgtatgtatgatacaataactgaagaagaagaggccataaagttaaatgggagagaaggtgagagggcctgagaggaaagcaagtgtgaaaattacataattacatgttgaaaaatattacaaagtttaaaattttaaaaagaatttaatgttagagataagctgataatgtatgttcatattccataatatacaagaaaataatccttggagaaagagctctccccccaaacaaatgttgtaactctgaacaactatttggaaatggtcattaggtcattcatggagcttaaaaacacatagatacttatttttaagagagtatcttgtgttatagcacaggctggactcgatcttgcaacctctctgcctcagtcttgtgaatgctgctatgaccccaggcagcaatcaccctgttggaatacagtcattcgttctcatttaaccatttggttcttagtgatacacaccgtctcaaaacacatagttttcaaggatatacaagtatggtaggaatcatttctgttcccgctcagctggaacacataaaataccaatactacagaaaagacagctctatctgctatggccacattctactgcgtgcgccaatgtcatatatgtgatcctgcgggagaggtggtcacatggaggaggagagtatctacaaggacccatttatacaaattccaaagccagacaaaagcaacgcctatgacgtgagaagtcaggacacacgcatttctgaggtttcccaaggacctggagctggccttatagaggccaagcagggttccatttgatttgagtactggatgttaagagtccttgcaatctggagataatctataccaccttgtagtagtttcaattggtatggcccccccacagactcatatgtctgaatgcttggccatagagtagcactactaggaggtgtggccttgttggagtaggcgtggccttgttggagtaggcgtggccttgttggaggaagtgtatcaatgtgggggagagctttgaagccttacatgttcaagctacatccactatgggagacagttcacttcctgttgcctgtgggccaagatgtaaaactctgaactccttctccagtaccatgtctgtctgcctgctgccatgtcccactatgataatgggctaaacctctgaaaccatgagccaccccaactaaatatttctaaaagttgaggtggtcatggtgtctcttcatagaaatagaaagcctaactaagacaatactcatttcctcacatttacatatgttatactacaatataaatccaacccaaaacaaatactgaatagtttcacaagtttaaaacctatagagattgcagaaataggaggctttacattcacatgcttttcttggggagtgcttgtttccccacactcacactgaaaacagatatttcaaaatatgagaatttgatgttgttctgtctagtttttatattattggtgatggcaaaaaaattcaaatatattaacgattggtgtgcatgtaaataatggggatatataaaaaaaggagacgaactatgagaaagatcaccatactctaggacacacacattcatacttagacacattcatactcacacatacttacaacttacacatattcacactcacacatggagcacacatgcgttcatacttatatacatacagcacggacacattcacactcacatacctagcacacatgttcacacagcacacacacattcatactctcacacatttacattcacacacacattcacacacacacacacacacacacacacacacacatacacacacacactcatgcacaccccatatacgcagcacacattcactatactctttttataaaatgatggccagacagacccactggggaagataattccagtcttatcaccgatgtgagataacgctcttgtttactgtaaacatttgtcacttgtattggtttaataaaacgctgactggccagtagccagggaagaagtataggcaggactactagacgaggagaattctgggaagagggaaggcagcaacagagcagccagccagatgcagcagaaacaaaatgagaatgccattttgagaaaagattccaagccacatggctaaacatagataagaattatgggctaagttaagttgtaagagcttgttagtaataaacccgagcaacaagccaaacagttaataattaatatcagcctctgtgtgtttatttgggactcaacagccacaggagaggacaggacaggacgggaggggacaggatatatacttgcagctacacatcactgcctcgtctcagtgctggccacagcttgctctccaggctcccttgtgtttctcatttcctgctacacactgtcctctctctctccattctatctggctcttggactgtggaattgttcttccccaaagacccgcacagtttgacatctcgccttcactgtgtcttctcaggtgtgtctccccttcaactgctctattcacagtgggtgaaaacagccctttgctaccgccttctccaccacagcagcctctccagaaggagatctgggttcattgttcatttcatcaccccccatcctctcccctcaaaaggtaactgccatttcagttcttagttcacgaccagagacgtctcaaagtgcttttcttctttcccatatctcacagttttgcaaccactgtcaggctcagcagtttgaacgttagtaggaatctggggttggcacttccaggagagcccaaccatgatccccgatggcttaggtgagagtcttgttctgccttttaatgtgcattcctagaatgcattcccaatttgagcctctctcacagcacggctcctcactggacaaagcttccccatatcttgatatacatgggtgtctttgtcagtgttttagtgctttgaagagacaccatgaccacagctactcttatgaagaaaagtatttaactggggcttgcttacagcttgagaggtttagtccatcacattcatgctgggagcatggtggtgttcaagatgagatctggatctaaaaacagcaggaagagagacagagctactgggtctactctgggcaactgaaatctcaacatctaccaccagtggcacacttcttccagcaatgccacacctcctaatccttctaagtagcaccactccctgatgagtaagcactcaaatacatgagcctgtggggccctttcttattcaaaacaacaatgaggttttcatttttattgcttttaaaaagtttctttctctatgaaggatttgatctccttgcctctttcagactatagccacttaacagtatctatttatttatttagtcagacagtgtgtgattcagctatatttttgttttcctttgactattttaaaatgatttcagagtgcatcagatggtggtggaactttgttttgttgacttctacatcttaacaccttgaacagtggctggcacaaaacagagtcctcaaaatatttgctaaataaatgtttaatcttggaaatactatttttagtgtgctaacactttgtcctgagtcagtctctgtgaattctgctctacagatagagttttgtagtggtagagcactacttaaggaaggatggtacaattagagattgaagagcaacagcccatcatggcggggaagccatgatgccaggaaggtgaggagattgcacacagtacatcctcagtcacaaagaagaaagtggacgagaagtgtggcaggatagtaagacccacccagtgatacactgtctcccatgatgctccccttaactaaagattctacaaccttacaaaaccacaccaccagctgaggaccaagtgttctcaacaagtgagcctgtggaggttgttaaacttcaaatcacaatgctatctcattttgacaccatttaattgaacagtgaattataatctatctaatatactatggtgatatattatgatttattaaagccactggagatcaaaatagcaaagcagccatactagttagctatggaagccaggcagtggtgacacacaccttcaatcccaggagtgaggattaagaggtaggtggatcactattagttcaaggccatgctgactacacgaaattgatctagccctaaaagaaacagctcaaacaaaggtgatctcagcagttggaatcacatgcctttaatcctagcactagggaggtgaagacaggagtgatatggctggaaggagaaacaaatagaaagaggaggagacaggatctgggagtcttttgcctctgaggatttgtggggacaggattgccatttcagctgggtagaggtaagatctactggcttggctgctttgcttttctaatctttagcttgaagcttgaacctcaatatcagtctctgggtcttttattttttcatgctacaatctacctgttggttttctggggtaagcaacagaatatccagcatgggtgtggttccttgaagtaactttgtttattattaatgttttaacaagtgactctagcaaagtaagtatttaaacttagaaaaattttagctacaaaaatttctttaagatgggacttttattctgtttgtaaaaagttgaaaattttctgacaaacatctataaagtttatcagatctataattgttgtctagctcagggaaggtccatgtgcacatatgtacttaatttatgcagaaataagcatacatatttcatagatttaaatttatatggattcatgccaaataaacaagagttcaagaattatttgccaatatactaaatatattaaacatagagaaatgtcctgtatttcatcttacaaagcaagcactgtcaaaaattaatcaaattccaccgacttgcagcttcagtacaattgctgggggaccttgtctgtggaatgattttagtagcttctatggcaatccaaaaaatgaaaaacatatgttgacaccaaacagcatgaagaactcaccctgaaaggatttcatcaaaggcccctctgctgtgactggatctaagcagctgaaccaatgcaaagctactcctgacaactttggagcaaagagcccagaaatggagttaaaatgtacactcactctctctaatgtactgtgaacccagaacttcttcagactggaaggcaagatgatgggccaactagcaacacaacttgcacctgccttttctgtacctcatcacctgctctagcaatgtgataccaggtccctcaagcagcatgaggaagaaatcttctcaaactgagtgatcacaggatttcacatatgaagttccttactgctttgtggttgctgtatgtaccatgttatctctgttgttgcatatatgttcattgtctctcaaaagcctgtattcagtttgtacacaacacacagcctttaaacaggcgatccttgaatgcctgcccaatgaaggaatttccctccaagtgctgcttgggggatgctggaagactagcaggcagctcctgcagctttacaggtccagcctgcacgagcatagagtcctttcttattgggacccacagcttcagataaaattgccatcaaacttttctattttattcaagaaatcccccaaagggtgtctcctctagacagttctcatcattgatgatacaactatgatagtgagaggggcaggtattcccagacattgcaaaagcttagaatatagagttggtatctgtttttatttttgaaggatatattatcatcttgcttttcatttttctgtgatccagaccaaaacaaacttatgatctccaaactctacttggaaacctatcttatagtttcattattactatcattattaatattttggtgatatgtagtagtggtgatgtgtgtgagctttttctctatttgtgtctgtgtctgtgtgtgtgtgtgtgtgtgtgtgtgtgtgtgtgtgtgtgtgtgtgtgtgtgtgtgtatgtgtatgtgtgtgtgtgtacagctgtctctctgtgtctgtatatgtgtgtgtgtgtgtgtgtgtgtgtgtgtgtgtgtgtgtgtgtgtgtgtgtgtgtaggtgcacatctctgtgcatgctgcagaggccaatgaagacttctggtaacctgttgtaccttactggcccgagacaggatctctcactgaacttagagtaaggctagcagccaataagctcaccaaccagtctacctcctcccatcagcaccaaggctgaaggaacatattcagacacatccagccttttagttgggtgctggagacttgaactcttaactgtgggggaaatgctctcacatttgacctatgaccctagtcctgggaaaaccctcttgttgtgactccttccgttagtaatgaatgaccctgtttagctctgtaagcaatctgaccatattctggagaggatgctcactttatctgtgcacagaaataaaggattgtgagatactgtgtggcacattgttttattccactagctaggatgctctcacgtgaattatccgaagaaagcttattcataggagaaggtctaaagattccaccacgaaataacccaggattcactatgtaactatttatctgatttgatgacggtctctttaaataggcctccagtaaactaaaaccacaatgatggatacaacatcagcagcaaatggctttactcaaaggtatgttttaaatctgtgtttctatgcatttgcctcataaaacaatttaaaagctggtacgtttatgaagaatatagttgtttagctttaaaatcatcagttggctagttgaatatactactctgcagattacacaccaagatcgattttctgaagcaatgaaggctctcaatatgtagctttaaatttctgctacagtttaactccacatatgaggaaagggatacttggcttaggtaaagctgtctatatacagaattctgaatgatcttattggcttaggtgaaactgtctttatacagaattctgaatgaccttacaggcattctgacaccttcttaaataaatgtgagtgactttgtcatttcaattcactaaccaaggctcttaaaaacagtatcttctgaggccttggtggagccactgtcctacagtccttcctgagccactaacaactctctctgtcagtaggtacctacacactttgttccatggtgctcagtttgcttggtgtctgtctattgagattcttactttggaaatagcttcttttttatttttttctttttccctataggagctttgtatttttttcattaccaagtgtgaacaccaggtcagatttaattttcttccttgaggcttaccaggaactagtacctagcattggttcacttaatatttttttaatgaaaaaaagtcacgaatattctccaaatgtagatttagaatttaaaaacaaaacatagaaacacagataaatattttgctctttcatgtatgttagacctgaaaatggaaatttagaatcagagattagaaatattttgactctaagaatgagaactgtgtcctttcaagatggagatagttttcctacaaagcacattatattaaataagagggaaaggacttaggtataccataatatgcaggagagatcaaacaggaacaggacagtctttgtgttcaaccttccaaagcatggcagcatattacattttttttcaattgagactggataattttattagtatttgtaaaactgatggtaatgttatataaaaatataaacattaatgtcaaaggtgaatatagtgagagatgactaatatataacttttgtataattaggaacaaattcttcacacatatgggacagccaataatatgcattattttcataacaattgtgttatagactggtcaaagattactataattaaaaggtgtcttcagtattagaaaaatattatttaaagttgctgaaaggttaactagatttagataaaaaggttgagtacaaacttacctttagcaataacaaaggcatgggtgaataaacacacaagtgtaaatggtatttatgcccttaacattacaccaaatgaagaagaaactcaccttgattcatattttcactcattttttctctttctaatttgatacctgttttattttctttttttctccctgtaatactcaccactggtaaaacaaacaggacattttagctttaatcttcttactacataacccaaataacttcagtcatgtttgcattaatgttgcattaatcatgttgttgcgtattaatgagttttcaggctatgctaattactgtcatagattctgcagcagcccattaaatatacaaattacagaattaaagagccagagctcttcatgattaatctctaaatggagaaaaactaatgatgtctatacaaagtttctctctacttttggctgagtgagcccaatgaacaatcaattagaccatggggggaatctgaagccatccaactacacaatcccatataagagctttgtttctgcagtcagtattgttttatatttcataagaattttgcatttatgtatgacggtcctcgatatcggtaacaatgctgttcaacatatgaatatgacaagtttgtaccaattccattccacagagatcctgaagttcccagtgagatttgtgtaaaagcattttcatctcaaggaaattgtcacaagaaagacctctgatacaactatcacaacaaaaggccagggttttcatgagaacaaagccatgatgttctgttggaatctgtgaagtctgcatttgtatcacagagtgaagttgtcttgaatagcagacctgagctggaatgggcggtgaaagagatgtagtatttttcaaggcaggtaggtggtctgatctcccagccacaagctcagggagagtgtcatccttaatcatagggacaaggcacagcaatgagcctgtacttcaaatgcagcaaggataccacagatgggtgctgccaaaagcgagtgagaagaggaacagtattggatcacagagatttgcactcaaagacaagctcgacagtagagctacaaagatgagcgtgatttgtgtatagcccaaatgtgtctgcatttgacctcaagagtccaagggtgagaggtcagagagatggctcaacagttaagagcacttaatgcttgggatggctattttttggttgctgatttaacttaatctggaattaaagtcaaaatgctttgtcacactgtgagatttaaagggaaagacttacagaaccctaactaagaaagcactctttcataggacctgagtttggctcccagaacctatgtcaggcatctcacagccatctgtaactccagctccaagaaagctgagggctcacatcttaaaactgtaatcacggagcaaagacagactagaaatgccatgaatcttcacactccacaaacctatttacagtgccacacttcctccaaaaaggccaaactaacctaaaccttcccaccaaacaccaccaaatgccagagactttgggggatgttttaaaccatcacatactgtgcttagcatgcagatgagccaaagcccagggaggattcagccctagagaagcatgcctaagaaagcactggcttttaaggaagtgatctgttctcctgggaaactggcagtcacacagtattgagtacagggctcaagcactgttgagggacgtgagaaatgacacagaggggctgaaaagacaccccccttctatgtatctggcctatgaagggactaaaccatggattcactccttggtgacacccaatagccatttgatggacatgacgacaggttcagttaaccttggaagccagtcagtcctggaagcaattccaagaaccactgcaattgctgtgtatggagaatgtgttaatataaagcctgtgagtaaacaatggcttatatattcagtgtcttcatggctactatttctcctcacaagccaatgcagttaccatgactctctcatttgcttttgagtcagctgctacggaagagggctcagaagcaccattgaaacgaagtcaggaggaatcacctgactcacactcaagactgccactccttctgcctgctgccaggtctccacaccatggttccaggtctctctctggaaccataagctaaaaataaaatcttctcctgtaaattacctttggtcatggtattttatgctgaactctatgtatgtctgtgtgactaggtatgagcatgtacacatgcctgtcagggcccccagaactggagttacagacagtcatgaatcctctgagattggtgctgggaattgaactcagttcccctggaagagtagtatatcctcttagccactaagccatctcttgtgccctggtcatggcacttttttatagcaacagaaaggtacacaatgtaaggagtcaagctgaatataagctaaccatctaagaaagagatttttttctcttgcagtagggtgtggtctgcacagaccagagatggacatggttcgttacagagaagcagcccagcccccggatctttactgccattaatgacaccatggctcttcaccaagtttgactagattctgtcaagaaaggctgctgaccactgtagctatgctcacccacacacctcgcccaccagaaggattctgaggaggctgtaggtgaattgctgatggtctggctagtaattaaatagaaatgtttttttgttgctttagtggtaattgtgtgaacacaatgaggctcaggcagacaataataaaattgatagagaagagatacataattggtgtggataaaagataagttcataaaaaagaaagtcagaagaatggactaaaattctgcaaatttagacaacatgagagttcaagcatttaggctattgaaaggcaacaggaaggaagcatagacagaaatacacagcaggctcgaggaggaacattgattagacactacacacgtggaatagaagaatatattattaaaaaggaaatgaaactaatgaatgggctggagaattacagtgggtcaaggcagaaatgtcaccaagaaggaaggcagggaacacctccagagagaaacacagcaaggcccaccagagctcagcaacaaaaactccactccaaaggagaacaaaccccaaacccctgtaagggccaagagtcatggcagaaatattagctgaagggaagcgaggacgcagccttacatcaagttttaaatcagaaacacagactcagcaacaaatctgccaaatgctaagggttcagaggaggtggtgtgattatcagagagccctgtgcatgtccctgatgccatttccctaattatggtggctgccatgaccttctcctacagggacacacccaaaacctggtgtaattaaggaagactgtgcagggagggactgtaaggtggaaggaaacatctcccttcatctgccagtgttcagatcagaagtagaaacttcttcctgtcagcctaacagaaagcatagacttaaaaaaagcaatacaattatcaatattcatattagtgtcttattaagcatgttgcttattccttgttgcctggggtagaataaataggatgaattcccctcaagctttcctgtgactcagtcagctcacatgtaactcacagatgttaaattaccttatttcgatgattccttctcttttggaatagagggactgaacccaaggccttgcacatgtcaggcaagcactgagctccatggctagccctaactcaccatggccactgtcctcaaagggaatggaattccccaggggctcttcaggtctagtttggaaatggctgaagaaacataagaatttggattacaatgttttttaaggcttctccttttttcctttggtactactgaatcaccatttatttaaacaaataaacaaaagcattggctgatttttttttaagcgagggaggtaattaaacatcgttcaacatacaagtcacatggggtccctctctgttcctaactctctacagacttcttccttgctcctgtccctatcttgttctcctttggtgtgaccaacttcccatcttctgtttaaagtaagagaaaagagggtacatacataagcaaaattagggaagtcctaacaagctaggtgaatggcaaacatgttcctggctgggggcgcctttcaatgggagagacttgattacccactggctggttctatggttgtttttgtaccatctatttccagattccaagtggtttgaatttcaccgagagtaacctctaggagcagactttatcctgttattttttcttaaatgacagtcccaggaaaacaaattccaagatgaagtgtgtgtgtgtggaggggggtgggtggggagatagggagacctgactttggagagatgctctgctgctgacttataggagtcactatgaatgcattgccttccatttccccagatgaggactgcggggacttgctagtctcttctaaaaggacttattcaattagccacctggcattctgtgggtgtcatcaaagagtggcctgggtctgccagcattaaggataactgccaacgtcactcactaaatatgggaggttaattttgtacatttgataaatttgcatttcaaaagtgcgttttgatgccttttctcttatctgaaataggaacacaatctaaagattggaaacaaggctggagagatatcggttggggtgctgactttataagcatgaggacccgagtttcaaaagagctgagcaaagtggggtgtccttgtaatcccagggccagggagacagaaacagcatatcccttggaggtccctggccatgcagctcaggctaattagccagtttcagacaagagaaagcttctgtctcaaaagcaagattctggagaataacatgaaaggtggacttctggcttcctgtccacaagcacacaaacacatacacataacacacacacacacaaacgaatcatgacaaatagctaaattttagagagctccctttgtgagacctgctgggattaggagtctattcttctctccattcttaagtgctgaagcttgccttttggcatattcttttgagaacatatattcaatcaatgatatctgtcatctccatgctagttccacattctgcaaaagggactgaggacaagagctagtgtatacccaagtgagacacaagttgttattgttaataaactcacaaaatagagttctctatgtctgaagaaatgatcacaatgtaatatttataatgaatttaatccacgattaccttgctcagtttcattaaacaattttactactaggtgaagcctttgctgcaggcatttttttcatcagtgcaatgtatggggttattagtagggaaactatgtttttatcacaataatccaatggcacttaggaactatgactcaggatgatgcaaaggtaaaggtgattccaggagagcacatggcttatcccacgtcagggtttccaaatgagatgaaacaaacacacattttcagatgtaaccctcagagcagtgaacactggtttctatgtggtatttaacaaatacttcagggacctggggagatggctcagtgggtgataatactttctgtgcaagcatgacctgaacttagatctccagcactcagtgtaaaaagctggctgttgctgtgtgcatgccaatgaccccagtgttgagaggcagaggtaggaagagcagacagctggggtttgatggctgccatcttagctctagtctcagggagaaaccttctctcaagggaatagctagagagaggtagagcagggcaccaaaagacctcctctgttcacatgggcacacacattcccatgcacagatagcatataaaacacacaatacatatgaacatacgcatgtgctcatgtgaaaagcatttcaaatgtttactttctctaagagtccgaactctctgagaagtgatggggatgacagcaccgtgtcaataatatgcacagcaaagtgacacacgttcttgtgaatggccggggtcagaagcaaggtgaagcttggctgcgcttcagccatttttgatgaccctttgatccgggagctcttattgtagcactgattggattcagagacacggaagaatatgtttcctttaaggggagtgaagaaaggaattagaaagtggcctttggcactcattctggatacactcctggaagacaatgagacaggaaaggtcacacagggctgaatcccatccatgagtccactgagacgtctgttattggatccccttcatcagctgtggccaggttggcgttttctttcctaatctttatttgatttgtttcatgagaaagctcttaggacagtgtggccacccccatggctggcatgcgtacagaggccttgctaatacccatctgtgctgctcgccgcttatcaaatatgagaggacgattttgcagagcctctcatgccacgcaccacatcacactcccaaagtagcaaaggggattttaaaagaaggcactgggtgagccgatataccgacgagtaaagggtgaccatcaaagaattcaaactaaaagctgtcttaggaaaatcacccattgcccatcattcttttactaacttttgcttttctctgtagggtgacttctgcttcatttccttggagctctggcagggcccagcatggcagaagcatgactgaaaaacaactgtcaaccagacctgctctgtgcactgtaagaagaacacgctgattcagaagccagggtatttttaaaccctttgtagctgtcatcccagaagatccagcttgggaggaatcatcttggtgcccctgggaatactgcagatgacattgtgccagtgagggcaatgctgggcaagaatgtgaccaatgaccagggtagatgaatgaatgactaccagcagaggaacgagatagacattattacatggagacagggaccttcagactgaggtttatctataaatgctcagtattgtcatagatcacttcccatcttccttatcgattgcttcaaataaacacacaattgagatagaccttcttcaacttctagacaggtataaaggacaggctgaagcatgtctttcgtcaggtcaaggctcttttgaacttcaatgtgctgttttgaggtttatcttctaaaatcataatttctttcacatgcttctttcaaaaaatgtggtgggcatttcctgtttctatgtgagagtggatcatgcgtgctgctcatgcccctggaagccataactcttccttgagtaactttttcagataggatccaccagtgggacatgaggtttgcagattagattaggttggctggtctgtggagcccaggcatctggctgcctttgtcctcccagcactgggattgtaggtacaccgtcgtacctgggtttacagggttcttggtaacagattcgatcctcatgcttgtgcagtgggcccttcaccaactgaactctctgtctctactgccaagcttcctgtgtacctttttagtgcaaatactgtgtaagtcctgtttgaaacaaaattagatggaaatgccttgtcccattaaaaacactgaagttacaaactttcccaaattgtcttctatatttaccacaaaatggccaaaggggtgagcagaagacaatgctttctggaaagtgatgtttgttgtttcccaaatttgccttttgacccctcaccttgacacttttctccaggaatgtcccttttcagagtgcaccatggccagtccatttatagttgtaaatgctgcctgtccctcatagaacatttcattttaccttcttccaaggtccttgtgacagtggtgagttgtctatgtcactatgtatcaagggtccctaggaagccttgctgtcttcaatccttatggccacattagaaaggcacagcagtcaccatccccacccccatttcacacagggtgaaactaagattagtacaagatggcacagagctagaaaggcggtagagaaaagtttcaacctgtggagatccagatgttcaacagcccaggcccataaaccttgtatatgcttcttcttgcccctttcatgtgagatgggcttttctgtttggtgtcacttttatctgtctgagcttgaaagaaaaggcgttatctgtcttctccttcaggccccttgacctgtgaaggctactttttcaaggaagagaaataaatcttcctttccactcccttgcatacttaagaccattcgtttgcttagaattgtctgtccagctgttattttcatgctgtagactctttgaagatcacaaatgtgtcaagcatatttttgcatctatcacacacttatttgtagtctttatagaactaagtatccaataactcccctgtggcattttgtgaaattgggttgctttaggagatcaaggtcttggctcctgtagagaaccaccaaaggcaaagctcatttctaatctcatctttcattcaatggccttcatgtagagataccttgtacctctcacactgatccttggccatcaaagtaaccacactggttctatggttagaactaagaggggaataggcactatttaataaccatttttttttctgttgggtaaagaaatagaggtaaacaaaatctgtggccttggtaaacctcaaagtatctaaatctcagctaattcaagatcttttatggcagtattccacttgaaattcctccaatggagacatatatggcaccttgggccatcttttatctcacataaaatgaaagcctgcttataaatgcctgcagaccaaaaaggacagaatggctaatccacattgcaaagtcaaagaatgataaatacttaatatattttctctcataatgggataaggatttatttctgatagacagtaaaatcatattttcatcctcaaatttccaaagtgtcgatgtttgaatacatgctgagtgcaaggttaaaacaaatgcagtgaagggatggtgtggacagaggcagtgaaggatggtgtggacagaggcagggaagtattgtgtggacagatgcagtgacgggtggtgtggggtaggacagggtgaactctaagtttcctgaagattatgaaacacctctgtctctagaacacgtttctcatgtgaaatatcaaggaggtcatacagtcatttcaaccagaatcacaacgaaaggacaaattctgtctaatatgatgtaacataaaatttcctaaatgtattgaaaatcgctgatcacatgtttactgatatgttccctggtccagggatcagggaagcacaacatactctgaaggcccgtttatggctaaagagtaagttcagttaccctctgaaatcctaactaccaggaagccctgaattctgtctatctgcagggataggtaattttatgcaaaagcaacatagcaggaagtgatcagagatgtgttcatgaccaaactccagatggagagctcagcacatctgagctcaggaagctggggaactaggacacagctccctcaatgagcttagggatggctgtgctcttctttctaacaggagaaagcatcagctgtaggcagggaaatataaggctatatttatttccatatttatgctccccaaacccattatgccatcaactgaagaggggactaaattagtacctaagtctattttgtttcatcttttagagaaaagaaaaataaaaggctattcttcttgggattttatgttgattttcattttattgcataaatatgaatgattaccatgtatatatctgactaattctgaatgatgataatcaggaaatatcttcttcctttgtagtgaacacattgatagcttaattctcttcttcttatccctttcagagaactgtggatttatggaacacttaagattatgattgattacaatatttgtgttataatgaatcaggcaattggatctctcatgttgctcctcggatatttgccctgtgttgtgttaccaacctgccaggaaacactaatggagagttgtttggactcagaaacagtgagagagatgatcaaaacaaaagctgtgctcgatactatgcataaacacctcgtgtctctcaaaacagagtaccgtgactaaaatacaaataaactcaaagattaattcccaaatcaaaggaaagaaaacagaacataaacttttaaaagttactccccatatttttctatctattgcagaaaaaaatacaaaggaacataatagtctgatgcaagtataaatttacatataatatctttgataacagattataataattaaaattagagcaactgaggggttaggattccaaatttagaaaatgctaaattaattgccatggctagaaacattaatacatccagtatctgagttgatcaaggatgccactttacagaaaatggcagaaaacggaacgtcccatagagctaaccacattagtcagttagaggatttagggacattccatgattagagaaaactcaatgtatttagatccacacaaaaccatctttgtcaacttaaaagctagtcttgaaggtggggaatgaaccagataaaaaatttctgccatgctgctctctctttaacacacagaacacaatgtcaatgttaacagctaataaaggacactttgcctatgaaatgaatttcactgcctgcaagagcagccaaaaatattcaaaaatgttgcttggctttacacaactgcacatagtaactgtaggaattgtataataggctgtcaagaatggctggcaggaaacaaacaaacaaacaaatgtatgctagggtgagcttaaggcagatgcccaatacccagtaacactcaagaatacaactttaaattagtctgcctaaaattatcttcactggaattctctggttaacaattggattcaacagctggtagatcaccatctaggcatcaagacagctgtcacagactcaaagaaagagttggcaccactgcaagtgtgatatagcaaggatggcttagcactcatacgtgaaacctgatatactcacttatctacaatttagttccatctttaaaatttaaaatggactgccttccttaacatgatggtgcaagcctgtgatctcagtatccagggaataaagtgaggaggaggaggagttcaaggttattctgggttacatagtgagtgtgaatctagtgtgagctatacaacatcctctctttcatatatagacatgtctatatatgtattgtacacatatgcattatatgcatatatataaatgcatataataaataatgcacatatatatctatgtggtaaagaggccattagtggataagaaattacaatgctttcacagagaactggagttggtccctagcaaccacactgagtagcttataactgctggtaactacagatccatgggataggaagccctctcctggacattgtgggcacctacacttacatgtgtgtatgtacatgcatgtgcacacacacatttatacataactagaaataaaatatatcttaagaaaaaaataagcaaacaagtgctggaggatatagtggtgtaggcctttaaaactagtactcaggaggtacatatctatgaatccaaagccagcctggactacatagtgagttctaggccagccagaactacagagtgagactttgtctcaaaagtaaataaatacacaagtaaatagaaaacaataaaatggaccacttatatggctcttcacagcttattctatattctctgaaattactacacattgtagaaatgagcattggatataaaagtacaagtgaacaactcagtcctttgtctaatataagctactatatctaggcaactgtctgatgcttgaggaatgtgtccagtgatgagctgctgtacttaattcaccatttggttttcactcatactgtgattttcaggatcaattacctcagatttacactgaataataggcacctactccccaatcaccaaaccatcatcaatgtgagaactaatgggaagccagactctttgctgtggctcccatattatagacagttaggacaatgcaccaaatgaggaaatgagcactgccaattagcacccctccctctgctgggctcgcatacatctgaaaacagcgacatgtgactagcataacctcaatgctgcattcattgacctttgaggaagattaatcatacatggatcttggcctgttaagcatcaatacaagcaatcatgaagaggaggaaaataaaataaatgattagaaattttgtccaagttttcacatttgtagtccaaaattgattttcttgtgcactgaatgagtagctgtcaaagcttgtactaattattagcttttactacatttgtgaaaaatgcatgtggaatttatcatgctatatggtttatgtggtcatttatcgtattgcaatagttgtgaagacaatcgcatgtctttcgttagcatcaaataattattttgcatattaatatttccatgacgcaacataggaaaatgaaacagctgtttcagttggtgtatcctggttgttactttgtaagtaaaaatgaaatcattgtctccacactatgattgtctgagcccaagcattcttacagaaacttagaatagggtacctaggccatcactacagataaaagtcttatgctaaaataaaattattcagttgttcgtgttgcattcctgggctgcattttaaataaaaacacatgccatcattgattaaataataatcactaaggctttgatccaccacactattgctttagctaccataccctgcaatgttgatggtaatactgtaaattttgcttagtaaattagatgtgaagaataaagagtgtgatattcttctagatttcttcactgacttaattttcacattttgttggtgacacagagtgattattatgaattgaattgtatccccctgtggcagttccaatgtaactggccccccataatctcatagagagtgaactattaggaagtgtggctttgttttggtatgaccttgttgaaggaagtgtgtcactgtgggcacaggctggaggatttctacactcaggatactgcccagtatctcagtcaacttcctgttgcttgtaagacttaggattgtcagctactcctccagcatcatgtctgccttcacgccaccatgcttcccaccaagacaatggtctgaatctctgaaagtgtaagcaaaaactctcaactaaatgttttccttgtaagagttgctgtgatcatgctgcctttttacagcaacagaaaccctaactaaagcagaagttggtacctgggacttgagtattgttgtgataggcctgactacgtttttgttaggagtaatatggactttggtactgtggattagaaaatcagatgaatattgtaagtgcttcttgatgggccacactagtaggcgcctggaaggctatggcactgagtatgatttgatgaactgtgaagtaatcactaatggggctgcataaaagaagccttttcccagagatcactcttgtgatgcttctgtgaagaaaatgttgcctttgccctcatctgaagaatctgcctgagactagcgggaaaagttttggattaattccactggcagagcaaatctcaaaacagcctagtatagactctgttgtgtggtttttagtgctacctctaatgaagatttgtaatgacaaggagcaaactgagcagggtaaattacaaaatgtagatttttgaggagaaacgagcaccagaaagaggaataaagctaaattatttgtttaaagagataaatggattaagaaatgaaataaacggagtggtgacctcagggcacgatcccacccagctatatttccaacttgtgaaaaggaactaaagaaaggcttgaagatctgggtgtgatggaacacacctttaatcccagcacttggagggcagaggcttgtagatctctgagtttgagtctagcctggtctgcagagcaagtttcaggacagccaagcttgggcagtgaaggacaggaagctggtgaagacgtagttgaacaaagggccatgttccagcatcagtaagcagcagatcttggtatccatgcggttctggcttcagagttaaggatggaagaaacaggttattaaatttgccttcacataaagaaagccatggacacttgggggaaggcctgggccctatcccaaaggatatgacagactctgaagatgccccatgaagaccccactctccctgggaagcagaattggtatgggataggtagggtgttagtggggggctggggaggaggggaggaatagggaactgggattgacatgtaaaacaatctaatttgaataaaaaaatggagagagagagaaaaaagaaagccactaagctcaagagagtctctgaatggaggcctagtagagaggccattgcaagaaactgtgaatgtgaagcctgaaacatgggtttgccttgaagaacacaagatgttagagatgccagagtcagggattatcttctgaggagagctgctaacagggtttggaaacagcccgagagaaaaagtgtgttgcagtcaacaaagctgaaatgagttggatttttttaagagtgttttgacatcagacatggagatgcagagttagcaatttgcataactggttttcagtcttgctttggtccagtatttcatcattatgctgccttccctacattttgaaatgggaatgcatctcctaagtccttctatgttggaagtatgtgatctgttctttaatttttattttataagagatcatatttaagagactgcattaatctcagaagagactttgaactttggacttttaaacattattgagactgtggtagacaatgaacagcagtatgatattcttagaagcttatggggaccaggattgcatgtggtaggttgctcatacagaaccaatggcacagcaatcttgatctcagattctattttctagtagacattagatatataggactatttatctagtacagtatctaatatctagatcaaggacatagatttttattgcttaagccatccagctcatggtatgttgttatggtagctctgacatactagtagtacagtaattacaagtataaacattaagttctgttaaacattttcaccagtgccataaaacaattatatctgacaatcttaggggtaaaatgttgaaaaatcacacacacacacacacacacacgtttgaaaatcaaagtagtagaacagccatcaccccaagggtagcactgcttccatagatatagtcacttttattatatatgcattttattatatatgcatttcctggagaccacaagcagttcttctgtttttttttttttatagtttccttgaaatattcatcatgggaagtcctccactttggctcatcttggcttttattgaccttttccatgacttttaacagattacttgatggcatttaaaatttagttctactctattctaacgatgtaacatccagacacgtatctctctgtctgtctacttatgtgtctctgcatgtacctatgaatatatatgtatctataatctatatatctatgtatgtatgcatgtatacatgtataatatatatgtgtatgcatgcatggatgcattatgtatgtatgtaagtatgtatgttatgtgtctgtctgtctgtctgtctgtctgtctgtctgtctgtcttctccctgtttctgaattagggaagacgactcttcctccttaaggcatggccatgagtaatactgtcacagaccagaaagatttcaggaagtcaacacaaagatgatatggtgatggataaaaagaaagaaagacaaataaactaagaaaacgtatgaatgtcttccattacgctgaatctgttgaatcaacctccagctcctgcattccttcctccagctacctaccaaggtggctacattcatcaccttataacctggcaggaattagccacgcacaccattctttggccttcttaggctcactgggtctattaaagttcagctgttgagtaatctcagtgaaggtcaggcatacatctccacagtgcacctcatcttgtgtaaaatggaatggggctctgcctgccattgccccttccatgaggttgaggggagggaaaagtaaggcatgactggacagtaaagttagctctgatctttatctaatgtggtcagagacaataagaccttctcaatatgctgttggaagatgaattgttgtatgctaattttgaggaatgtatttacatctgcctgtgtcactactttgagataataactcatgtcctgaaacttgggcagaggctgctgaacatggtgaggttacagtgggcccttgagtcacggctggcttaaaaggttgaattattcttcccaacttaaggaaaaaagtctgttttgtttatgtttatttttttttccctgtgtccaggactctatggttgggtgctgctatcactaagagatagcactagtaacagtgttctacctcctggagagtaaacaaagatcctgaattagaacaggtctggacgtggatgcttgttttgcctccctcaaatgtgcccctaaacagattcagttcagtgaattcaaaacctgccagccatactcttgataacatgttccctctgttcactactttccccaagttctaatttgcataaacatcaatctccctgcctcctgcctcacctaaaacagctctgcagagtcatgccccactcccccctcctcccagactcagcagcttcttctcaattattattcttcaaagcatccatgggaatgatttttcttttggtgggaagcagattccccacaaaatccttggtttaaaataaacaacagacacacacttaattagaaggtaattaactgactttatgaaaaattcaacacaagcctccttccaacaagggctgttcccctatgtgttcaaaataagaccttccaacaagggctgttctcctatgtgttcaaaataagacagtatagttagctctagccctcatccaatatgatctgagacaacaggagtttcttaatatgatgtttgaagatgggtcattttatgctaattttagagaacataaaagttttcatttaagtgggtgaataagtaactgaattgcctctttgctcccgggactccctggaataaggtctccacaaagacaggggctgtaaggtgtcatatatagtatctgttatgtagtacttgttccataaagatttctaaatgaagaataatgacttaggatgacatacttcttagactttgtaaggctgtggactgtgccttatattgtaggtatctatactagttatttttacatcacaatagcaacataagcctggaaggacttacttgcttcatggtttgagagaatgcagtctgtcatggcactaggcataacactacctgattagaaacaagaagcagagcgctcaggcaagaggggagcaggcaatcaccttcatgtcttgctccttcctccagccacccatttctttcacctggttcatacaacaacctcccaaaaaaacatcatgagacagacaccaacatgagtttaaagtcatgagctattggagaatatttcacaatcacactatctgagcatctttttgttttagcacaggtacctggcacgtgtcaatactgttgacaactactgtcactaaacaactgtccaaagatgaaacttctacccgtggttggagccatgagtgcagatgttatattctgtgccagttcaaagttccctctccctcacaacttcaacttgagctcccacttttagttctcaaagaaagcctcctagtgaggccaggaaaagcccagatacatgctatagccactggcacagcaccaaagtcacatctgtcaggttagtctactgccgacatcggggtctcgaagggattgcacacaactagatgccaattgttccaatagaagaactgttcatatagaagaacagaccttagacaacagccacagggagtggcacaagcatcctcaggtggacaacgaggctaggagagctgggacactgagctggcagccacactgctgaaggcagagcctgctccaagttcctcctggggttgcctctgcctccccaacagaggttccatcagcaacgacatatgtggctcccatgctgagggaatagaattgcttctgtgggagatttacttcctgacagtttaaacttcgtaagtaacttaaaaataatgggggcagagaacccatttactccaattacacttttccttttccaccagccattaggatttagcaagtcaatgcttttcctccatgtgctgaaaaactaagataggagtgtattatacaatttcctcagccctaattacaactaggaccatttggacctgcaatatcatctcagaagaaaacaaaagaaaaacaaaccaaccaacagacacaaaaatgagaccctctatcgccatcaggcaaaggggtccattaagttgtgctgcaggctcctaagaagctgccctgctgaagccctctgataagaacactgctggggatcatgggctccacagggaagactggtaccctgctgagtataccagaagccaagagaggctgccatctccccaaaacttctctattcccttacacaccacacatcctcagagcccttgtgtccagcctgactcatagtcatatatggctgagggaggctagcaagtgatctcagattccacaggttcccagcagccagccaaatggtctgtcttggtgacagatatctaggcatcaggtaacttcttttgctgggacaacagttcttttttatgcaatgtattgaaacaatgtgagttctttactagatgagttccttgtatttttaggatctcatatactgtgataagctatttgttctatatttaaaagtataatgatcacaccaaggaggatgtctacaccattatctgacagcgcttctgagtttctgctcacatctcaggtacagcatgtgtcagtgagctttctatgactgcgataaaatacagagcaccatccacttgcaaggtcaaaaatgagtatttaaatgtcgtcttggtttcagaggtgcagagctgaccggtccttctgcagggtggctgcatgcctgatcgtgacaggagctcctgctaggtcaaactgctcacctcagaaccaagaagtaaaagcaaaggagatgaaagaggcaggtaccacaaccacagggcataggcttaacctaggaaataagtctcaaatcaagaaacaccagaaataccatgagcttttcccccactcaatgagaatggatagttagaaggcatggtttagaccatggtaagaccaggcactcttgtatctatcttctcactaggattctcattgtaaccatgaaataatagagaaggctcaatggtttatttactgttgaagtgaataataaaaattgataaaaagtgagacagaaattgctctactgctgggttttatcaggtttcaccacattgcactcaatgtagaaactccaggaattttttatcagaactattacatttccctcacaactgtatacagatggggacaactaatgggtatcaatggaacagatgtgctttcaatgctatttcttgctcctttatgtaaacaaaaattacccattggttgctaggatataaatcacccaatgcttatcctgggtaattaacatgcaaaaggcacacttgggacatatctggcatgttaaagccagaggagctaatgaacagacaaagcaaggaccccaaccaactcaacaacagattggcacaatgaaaaccagatcacaaccaaaaaagtggttaggtactataagggaagctgtaggttgacaatttgatgggctgttttctaaggtgtcatcttgtcttgtcctgagatgctcattactagttctgtcctactcaggacaaaatgagcacagcaataaacagaagaaaaaagaaaaggagggaaagccacatcactcctctgaaatcctacatgcgacctggtggtagaccagttagccctcttatgagtgttcagagaccttgaaaggcacccagcaagagcatcaggaaatactctaacatgatgcaaaaaacgtgtgttcatttcacaaagagccccaagttcagacttggggtatttgaggtccccagtccagctctggtttgatttggatcgcagggcaatgattatgcctgtaactgaacaatttttaattatttaaattttacctagttttcaacctgtttaactccttgcatcttttctgaatacagagaacaaccagcccctcccttccatatttcatctctttatgaggtggaaacaggcatggagcatcaccctgtgttctttcctcaagactgagtggccttgggcctcccggccttttcttgcaggccccttttccaagaccctccatcatcttttgttgctctcttttgatgcatctgccccatctgtctaggttttaacaatgtaacttcccaaatggatcacagttctcctatcaagggctgagactgccaagtggagcataataattgccttgtttatcttcttgacaattctgctaataaagcacagggtagcactcaccttcttctcccttttgctaaacagcatggcagtactggcttcttttctgatgttaactgggataaaccatagctgccaaggacaggagggagtaagattaacttactaacccgttgctcagttgcagcatctagagaagtatttcaaaaatgctaggtacatgataaaaatggagcggtctgagagtcttgtatttacaaatggcattgcttcaaaatttcctttttgtagcagaaacctatatgaaatgggctggagagatggctcagtgagctcagcctttggcatcccagtgtgaggacctgatattgaatcctcagagcctaatgtgtcgccgcatacaggagtacatgtctggattctgatgatcataagacaagatgaaagaaagtaccaggaggaggaggagctccagacattcaatgtccagcagaaagctgtgagagcccatctcaaactacacagaagggcaatccagccaccaacgttgtcttctgacttctgtgtgtaagctgcataccatacacacatatggtccatacttatttattttttttgtcttttcgagacagggtttcttggtgtagccctggctgtactggaactagttttgtaaatcaggctgatctcaaactcatagagatccatctgcctctgccccctgagtcctgggattaaacacatgcacacacacacacacacacacacacacacacacacacacacacacacacacacacacacacacatatatgtatgtatgtatatgtatatatatgtatgtatgtgcacaacacatgcgtgtaatatattatgtgcgatatatacacgtgtgtgcatgcatgtacttaaatttatgcctctgcttagggctgaggtgtagagaagggagcaaaatccacacctgtctctcatctctcaaaggcttctacaaaatgaacttgtacaagaaagtagttagagtgcacgtaagtcctgctgtgtctatttacacaatgcagtccttcatttaacctcaagatttctggaaatgacaccagaaaactagaaacttgaaccataaaactactggtcaactaacttaaaatcaattactattcataatgtgagaggtgcccttatggaatttagctggaccaggaaatttgcttaatattagattttccagggccaaatgtgagaggatgcaagctgatttggcaaggttgattattccaacacaataaccctgagtattctgttgtatctgatgagcaggaaaagaaaaaggaaggaaggaaggaaggaaggaaggaaggaagaaaggaaggaaggaaggaaagaaggaaggaaggaaggaaggaaggaaggaaggaaggaaggaaggaagaaggaaatcagccttgtatttgtgtcatcaaaatgccaggaaccaaaacgctgcatcaggacttcccttatgtgatgtagcaaaccagaggcaaaactgaaatccccttcatgtcaggagctggacttaaaaggactggaagagtagacagcaactctgcactgctgggtgcacactcaatcttagaggagaggctaaggatgccttgctttacacagtagcagagtgtcaagtaccctgtcacaaagtagaaaatcttcattttactcaggtgagaaatgacccacagctgaagttcagccctaagctgaagaatgactgagggaggaacaaacggcatgttctgcattgcacatgtcatttttatacttaggaaatgaacaccttctgtgtgacacacagaaacaaatgaagtaaaactcatcttagaggccgaggcattgactcagtggttacggatattggctgctcttgtagcagacccggactcggttccgagcacccgtatcaggtggttcacaattgtttttaactctggtgccataagatctgaagtcctcttctggccttcaagggaatgcgcatgcatgtgatatatacacagacaagcagacatgtatacatacatattaacaataacaatttttttaaaaaatccacaaagcattaaggatttcattatttaaaagtactcaagttgaaaaataaactctaggaaattattattattccattatgattacatattggcaattgattttatacaagaatttgagaaggacctaaaattataaattacctaggctttgagagtagcccttccagatgctggttcatagaaagatgatgaaattgttaccattttttacctgcctgcctgttggaccacattttatattcgtgacaatgagctaaggaagccatgagccttctctagattagtctgtattagaggacacccctgctaggctcttgccctggctctgagtaattcaggttactcccatagtttctcctcctattcctatgccagtggcttctcctcaagttgacaatctctggttgtattttgtggccaatctatctaaagaaggaataaataaaaatcatatccagagataatggtgctgtataacacaagatcacagatgagctctggaaaggtcctgcgcatgccacagtgagcatgtggaggtcagggaggtggggggacagtgggaaactattcttgcctcccaccttgctgaggtggaatcctgtcatcgcttcttccatgctagctgctctgaatttcctatctctccctgccgtggccccatgtgagtgacgggaccacatttgcatgccactacgtggagctttttatgtgggtactgggaattgaactcagtcatctagtatgtgaaactagtgtttggccaacttcctgactcctcacacaccatttttaaagtcatttaaaaattgcttttgctggttatttgtttttgttggagcagaaaaacagcagcagcttaatggttaaaagacgtcaacccttaggttggagagatgttcaatgattagggacacactgttttgtcagaggataagagtttggttcccagttttcacatcaggcatcccttaactgcctccaactccaactccaggagatccaacactagcctttggcctctttgggtacttatacccaaacacacatagacacatatacataaaaataaataagcaaataaataaataattttaaacaggcatccagctgtgaattctggactcacagggcctccctgagaagagtctgccagcctggtacatcccaacaacctatccacacaacacaatagccaggcaacaaagtcacgaatgccaatagatagaacagaaagtaatggggagataactcacttcaaaacaactcatgttgtcatgtcctttccagagatagacaattctaagagttttcataagcagtttctatccatctccctaaatgcattgccatataggtagccacataacagagataatgttgcatgtcagataagagagaaaaggaacttgaaataggagatgtactgcaggctttaatgaggcattaacagctctggaaattagagtcctaatttgcaggaatttatgaagtaaacaaggagaatacagaaagtgacggaggctgtggcctgccacttctgtgccacacattttacaggagtgtcaaattgattttgcaatccttaattatatttctctaattgtgtgtgtgtgtgtgtgtgtgtgtgtgtgtgtgtgtgtgtgtgtgtgtgtgtgtgtgtacgcgtgcgcgagtgggggaggtgaatttgtaagtatgcagaagatattagttttcagcaaactatttttctcccagttaaaatgagtaacataccagcacattaacaccaattacaagtgccttggaaaacacattacagaaatgccgctgacatcaaggcaagaactggtcagctgtgtatccaagtgtgcttgtcctgcttagacagaattctttaccaggagaaataccagggatacacaaactatagtcacttttgcttatacagattttgggctggctataaatggcatcaaaaggaaaactacagagaaaaattggttcatctagtgatactgtacaaggagatgtggacaggaggaaagactaaggactaagagctcttcttttctagttacaaggatgacaaatggattccagaacccatggaacaagccaggcattttatacacccctctaaccctgctgtaatcacaggccctttacagcttctagcacagctgagaaaacaaacaaacaaacacacaaacaaacaaaacaccatgagtccctggtttggggaaaggcgctgcatcaaagaattaagtggaaaataatggaagacaccaatgccttcttttggcctctggcttgtaaatgaaattactctcacacattgacacacacaaacacacatcaaaaagaaataatcacaaaaagcataagctgtaaaccatgtcagcatagcttaaggaaagtcatttctaccaagtttgtagcatcctagatactagtttttttcaggtggaatttggaaggttaaagtgggtaactttgtttaccaattttcttgaggtacagctttagggtaatacaatccatcaactcaaatgatacaattcagcccattctagctgtctaaaacaccttaaatgccatcgtttccatcagtacagaacatttgcttcagcctcaggctgctcctctgtgtccccaaataattctgtcctttaaagattacatgagtgcaattagcaatgagtcctctttggctttcttttttctgcacaggagttttgagttacccatgctgctctcatcggtctacccctgtgcattgcttagagtctagggtatgactgaaccccctttatacactagcccactgctggccatttggatgatttccagtttggtgcaaccatgaagggaagtgtcatgagtatttatgtggatactttttgtggaggtgaattctttcattttcttagccaaacactcttgagagaacagtgagtcatacagtagatttaagttttgttgggtatatctgtggtttgttcaataatttctttttagtttcttgacaaagctcattttgttttttaatcaacatcagctatcttcttcctctatagtagtaatagtattattattattatcagcataatctctttttgttgtttttcaagacagggtctctctgtagctttggagcctggcctagaactcactttgtggaccatgctggcctggaactcacagaaatcctcctgcctctgcttcccaagtgctgggattaaaggcatgcctcaccacctcctggctctttaacccatatattaaccaatattttttcacttaaggaataaacaaaaacagttctggcccaaacactatgcgaaaagaatcccttctttctcttttttgaacatctctccctttctagattcatttttagtccctcagcaatcacagtctccagactgccagcattctcctcactagtgaatagtacccaaacaaagaagaagacaatttctcatcactgtaagtcagtgagtggctggcaggttggagagtgagcgaacacaacaagggagtcttacattttaagaaaagtgaataggaacaataagggaagaagttataattatggttacaagtgtacccagatattgaaactcagccagtaaatgtaaaactgccatgtgagcctccagggaaagaaggaaattaattaagtcacattagaagtctgcaggttgattttccaatcaaatgggcccaagaaacaagctggtgtagcaatcctaataaccaacaaattagacttcaaactaaaatcaatcaaaagagttgaagaagggcatttcatactcatcacaggaaaagtccatcaagatgaagtctcaatcctgaacatctatgccccaaatatgaaggcacccacatttgtaaaagaaacattactaaagctcaaaccacacataaaaccacacacacttatagtaggagactccaacaccccccttacactactagacaggaccaccagacagaaacttaacaaagaaacaaaggatctgacagaagttatgacccaactgggtttaacaggtatctatagaacattccatccaaacacaaaagaatataccttcttctcaccgccacatggaaccttctctaaaattgaccacatagttggcagcaaagcaaatctccacagttacgaaagaattgaaataaccccctgtatcttatcagataccatgcattaaagctagaattcaacagcaatacaaattgcagaaaacctacatactcgtgaaaaatgcataacacccaattacaccattcctgggttgaggaagaaataaacaaagaaattaaagacttcctagaatttaatgagaatgtagacacaacatacccaaacttatgggacactctgaaagcagttctaagaggaaagttcacagtactaagtgtccacatcaagaaactggagaaaagtcacattagagaattgacagaacaactgaaagctttagagcaaaaagaagcaaactgaccaaggaggagtagacgccagcaaataatcaacctgagggctgaaatcaataaagtagaaactaggaaaacagtacaaagaatcaatgaaacaaagagttggttctttgagaagatcaacaagacagacaaacctctagccaaactaaccagaagacagagagagagcatgctaattaacaaaatcagaaacgaaaaggggatataacaacggacactaaggaaatccagagaatcttcaggtcacactttgaaaacctgtactccacaaaattcgaaaatctaaaagaaatggacagttttctggataagtatcacttaccaaaattaaaccaaatcagataagcagtttaaatcaacccataacccctaatgaaatagaagcagtcatcaaaagcctcccaaccaaaaaaagcccagggccagatggcttcactgcagaattctaacagaaattcaaacaagagctaattccagtactcctcaaactgttctgcacaatagaagcagatgggatattgccaaactctctctatgaggctacaatcactttgatacccaagccacacaaagctaagactaagaaagagaactacagaccgatatccctcatgaacatcgatgctaaaatactcaataaaatattggccaaccgattccaagaacatatcagaaaaatcatccaccacgatcaagtaggcttcatcccagggatgcaaggatggttcaacatttgaaaatccatcaatgtaatccaccatataaacaaactgaaaaagaaaaaccacatgatcatctcgctagatgctgaaaaagcctttgacaaaatccaacatcccttcatgataaagatcttggagagaacaggaataacaggaacatatctaaatatgataaacgcaatatacaccaaaccaatagccaatatcaaactaaatggagagaaactcaaagcgtttcctctaaaatcaggaacaagacaaggctgtccactctctccatgtctcttcaatattgtacttgaagttctatctagagcaataagacaacaaaaggagatcaaggggatacaaattggaaaggaagaagtcaaactttcactatatgtagacgacatgatagtctacattagtgacccaaaaaactctaccagggaacttctacagctgataaacaccttcagcaaggtagcaggatacaaaattaactaaaaaaaaatcagtagccctactatatacagatgataaatccaatgagaaagaaatcagggaaacatcacctttcacaatattcacaagcaacataaaatatcttgaagtaacactaaccaaaaaagtgaaagacctatacaataagaactttgagactttaaagaaagaaattaaagaagataccagaaaatggaaagatctcccatgctcttggataggtaggattaacatagtaaaaatggcaatcctgccaaaagcaatctacagattcaatgcaatccccatcaaaaccccaacacagtttttcacagacattgaaagaacaatactcaactttatatggaaaaataacccaggatacccaaaacaactctttacaataaaggatcttctggaggcatcaccatccctgacttcaagctctactatagagccatagttctgaaaacagcttggtactggcacaaaaatagacaaatagaccaatggaatcaaactgaaaaccctgatattaacccacgcacctatgaacaccttatttttcacaaaagtgctaaatctatacaatggaaaaaagatagcatcttcaacaaatggtgctggcacaattggatttggacatgcagaagattgcagatagatccatacctgtcaccatgcacaaaacttaagtgcaagtggatcaaagatctcaccataaatccagccacactgaatcttctagaagagaaagtgggaattacccttgaacaaattggcacaggagaccgcttcctgaacattacaccagtagcacagacattgaggtctgcaattaataaatgtgacctcctgaaactgagaagcttctgcaaggcaaaggacacagtcagtaagacaaaacaaccacccacagaatgggaaaagatcttcaccaaccccacatctgacagagggcttatttccaaaatatataaggagctcaagaagatagccaccaaaacaccaaacaatgaaattaaaaagtggggtacagaactaaatagagaattctcaacagaggaatctgaaatggctgaaagacacttaggaaagtgctcaaaatccttggccatcagagaaatgcaactcaaaacaactctgagaaaccacctcacacctgtcagaatggctaaaataaaaaataccaatgacaatctatgctggagaggatgcggagaaaggggaatacttctccactgctggtgggagtgtgaacttgtaagaccactctggaaatcagtatggcggttgctaagaaaaatgggaatcagtctacctcaagatccagccattcctctcttgggtatatacccaaatagtgcatgttcatacaataaggacatatgttcaaccatgttcatagcagcattgtttataatagccagaacctggaagcaacctagatgctcctcaactgaagaatggatagagaaaatgtggtacatttatacaatggagaactactcagcagaaaaaagcaatggaatcttgaatttcgcaggcaaatggatggaactagaagaaaccaacctgagtgaggtaacccagtcacaaaaagacaaacatggtatgtactcactcatatatgaattttagacatagagcaaggattaacagcctataatcctcttcaccaaagaaactaggactctaagggacaaatggaccccaggtatgggaagtggcacgaactcctgagctaattgggagcatgagggtaggggagagggagctgccacaataagagcaggagaagaggagtagaggagaggaaatggaggagcagaaatattgagttgggggaagaatagaggagagagagcaggacgagagataccatatcagagggagccactataggtccgagaagagatctggcaccagggagatctccagagacctgcaaggatgacacgatctgacaatccaggaaatggtggagaggataacctaaaagcccttcccttaaaatgagattgatgacttctctttatgccatcctagagccctcatccagtggctgatggaagcagagacagacatccacagatatacactgagccgaaatatggaatttagttgaagagagggaggaatgaagatcgaaggggctggtaccaggttggagaaacccacaggaacatttggcctgaacaagggagagcacatcgaccccagatgctgtctgggaggccagtacaagactgatccagacccctgaacatggatgtcaataaggaggcctctgcactccagggagcctctggtagtggattagtatttttccctggcataagaagggactttgagagcccatcccacatgaagggttacactctgaccctggacacatggggaagggctcaggcccagcacaggaagatttggtggactttgcagagcccccattgagggcccaaccctgcctgggcagtggtgggtggatggggtgggggtaggttggtggtgggggaggagggatgggggtgaggtaagggagagggagaagggactgacatgtgaaacaaagcttgttccctaacttgaactaaaaaaagaaaaaaagaagtttgtacgttgaataaaatgaaatgaatggtcattggtatattggagacaaaggtcataaaaatcgtaccatcaatattcatgtgttttaggcacatgaaatgtacttaggaaatgaagggcccatccttcaagtcctaatttacaaaacaccagtcataagcatgttctcacaatcccccaggtgaggtctgtcaacactgtggatggactcctgcaatgacacctgttgataagccatggtccccattgaaaaatagattcaaaacaggaagggggacttaagcaatctgctcatgccatgatgggagacagattttacccttggggaatcggacacagccaccaggactgttactgctgtcaccactaccttctgcaccatactgtgagtgtcaatacccccaacgcccttgacatgattcaatcagcatggtacatccatagcattgatcactgttgtttacaaaccactttcaagttaaaagtgctctttactgttctgcatatgtttattacaactgccatcttaaacccatacaggtgaaagtatcaaatattcattaacatccaaatttaataagcctgagattctaacctaagagacgtatgaccacctgccttcaagcaacagactgattagcaatggcggtgcagacaacaggcactggtctcacaatatggccacagcagcaacttcaccactaattaagtctcactaataatttgattttatctcagtactgccctgctttaatacacctacgttcacatgtaaagccaagaaagatggagcaattgaattatcactctacactatcagtgcattcaaaaagatggctttaaaaatgcatatattatatcaccacactagtgcataataaatcttattgttaagtacttcgtacagtaagcaacccttctcagagattatttctttgctatcactcaattaattcttaataaatgagcattcttaattttttactttttggacatttggtgtgtgcctcacactgtgttaggaatagcgttgaaagtatcagaagacagtcatgatttcagtcaatggaaaacagcagcaaacaccccatttcaatagagtgtagtaagggctaagatagtgaaaatcttaatttctgtggaagcatgtaagacatatctctaggtgtagttgggaaaatctgcagaggaacattaagctggcagtttcatgatgagcatcggttagctagagataaaaagatgcaaagggggtcaagcatcaagaaattggtgacaggcaaggacagcagcatgttcctgagcatcctaggaatggaatacacttaggcaaagcagttggacccaaagacgaccagagaactcgatgagaaagcaagaagtatttggctggagaggagaggcagagaggcagcagatgagagctatgcagagctgggaacatattgaaaggttataaacaatgcaagaagaaagacaatcagttggagaatgacctacagaagagggagacttcacagagaagctcaggcaggtcaggtctgggcagcagctacaagtaaggtttctaaggcatggatgtatcagaaaaatgggcacagtaggaccatatgctggaaggtgaggatccttcatggagtcccatctcaggggctccatggtgtcactctgttggtaaacactgaaggagcaagttcagaagaagaaggcaaagaacagaaactgaagacaaagcagctattgtttttcagcttcctggattcactgacatcctggggtggcaggcacatcattaaagcatgcacacaggtttcctaggaatcacttacgacttcctcaaagtgtcctttccgtgtggaaacaaatgagtgggaacacactgaaagaaaacttgggtgtctgtgtgtctgacaaggtgttccctctccatcctccgagtctgcaatgcttcttctttgaagttgccttccatttcaaaaagaactaagctgagactattccttggctcagaggatgggagtagctgagctctccttcaggctcaactaaccaaagctccagggctacacttgtaggcccttcccatagttgtgccttgtatattatctggttagtattatttgaagtgtcttcactcaagtacaactgtcagcaatgccagtgtcccctggatactagactcagctcggaaatggaggatatctcaatggtaatatgattcagaaacttttctgcataaaaaataccccaactttacccttttagggatgtataatataaaagtgagtgtggtgatttaaatatcttcaattaattgttcagaaaacataagaaaaatcgcttgctttctaagatcaaagggaaggcttctgtgaccactgcaagcatcacagcttcttttatgttgcaagtcctcctctacacttattgaaactggatgaaaacacaaagtaaatgaacttgggttataaaagtacagaatgctgttagaataagccaatgtgttaagagtgggaagtgtttggagtgatactagaatggccatcatttgaaaagtcaccagacagttccaacatgtacatctaggtatgtgctcaagagtatgacatgagcatgtgtgtagtttgtgtatcatgaaacaacatatccgtttattgataagagaaatgcaacaggcagagactttgagttgatttgtagtgaaccaagagctagactctgggaaagtattatttccttgtgacaggactggggcagcttgccttactggcaactaaaattaatcttccctcctcctcctcctcatcctcatcctcttccttccttttgtactgagaaccaaacccagggccttgctcttggtaggcactctacctaccactgagataaaatccctagcttctaaaattatctcaaacaaagggcatcatggtaaaaaaacatttgctgaatgaaacgtgaagactgtaacacaggtcttcatgaatcagcctttatactgagtccggtgcctgggggaaatggccctccctcaccccaccatgaggcaatgctgaaagcagttcctaagcactttagaatgtcttctagcaaaggtgaccatgacaaattgtgctcctgggatgtccagtttacacaacatagtctgacttctgatattctggggtgggcacacagatcctgtccttctcaggctatacaggtgaactcaaccaaacattctcatctcctctgatgctgtcaccatcttgtcatggtctgaaggccatcagtccttggctctcctgccccatgctcttcctcaccatttctcttctttaccactgtgctcgtataattaacagctagccaaaaagtaggtccacatatttgttttctaataatgaaagccaatatcaaatatcagaggttaaccaaaatttgtaactgaaatctatcttgtaaagaggtagaccactttttatcctttattacttcttaaagcactttctggccaaattacttgcttctaccatgaggaaaacaaataccaggacatcaggggtgttgaagttcagaattaatgtgctcctcctaattagtctatctgtagaaggttacccaacttgtgccttcactgtagcatcttataatcaggtttgttttaatgaaaaactaaactccccaatcaccaaaaataataataaaaaccatacagtaaaagatataaaatgcatgactttaagaactactggtttggagtggggtgtatttctctttctgtacttgctgattacttgtattttgtatcctgaaaagaatcttcgcttaggcattttggggaaggcaaatacatgagacaaacacgaatgacaatcatttagtgtccttgagtatcatgaggaaaggatagagtgtcgcctgcaggatacttgggaccaccgatcacatttctcctgaagacaaataaagtggaattacaagtaggtgcatgtatgcgctcatctccccagtggctgctacaaagatctccccaaaggcagttgctgcttcatgggcagggtcagcagaggagggagttgaaaaggctggagtgattggcatccagatgccatggcagtcaaaccttccctcaaacgatcatgggcttgttttactaacaggaaaaagaatgacaaggagaaggagggtcacctttggagtgccagtgtgagcagatttcagatttctacctttacatggaaagaacaaaactctttgggtaaatcaaataggttcactctgtactcccaggatgggagggaggagataaagtgagcatgatttacttcctcctcccagcatgcaatggatatcccatttgagttggacgagtgggagggggctggtttggagagcaaaagtactgctggctggctgcatgcaagcagggagcactttttcacagtgcctgtgtgactgcccaattatcataaaagaattttcaattttccacttctttatacaccccttcaatccatctcaagaacaaaatagtcattttatggtgatgtgtgctctccataacacattttttcagatcattagagaaaatcaaatttatatgaatcttaagttatgaacatcatgttacatgagaaaaatcaaaacccaatagttgattaagaattcctgaggtttggactggagtggtagctcaatggttacaaatgcatgctattctttcagagacctggctttggctcccagacctatatggtaactcacacagtcacctgtagctcctgctctgtgagctctgatgccctcttctgacctccacaggctcctgcatacatgacgcacatgtattaatacccaatcatacacagttacacatacaatgaaatctaaatgaaaaaacttatgcaaatatctgcctgagttttaaacaacctgatgcttggctaatgacccagatttgaatttcagggaactacataaatactccacaatcatagaattggagcttgaagaacccaaagcattcacatctgatacaaaccacagcgtagattatgggggaatgttttacctactgcccagtggtctacctagtattggatccatttagctaccatcaatagcaaaatcaggcaccatattgtagaatagaaaattccacgtaacttatgcccgatataacccttagccaaacatatcttgtatctataagaatgaatgaatgaatacaacattcattgatcttcagtcaacattacagaaaactctcacttagaaaaactcctatttgtagtaggcatttgaatattaataattgtgtggtagtttgcagctggtgtttaaagtaagctgagcaacatttgtgtaggcacagaacatggtgtattatctgaactacccccttctactcatcccctcctacctgcaagtaattaatgcagtgtaatcatacacagtgtaaagaaagggaaacggagccccagaaaagagtaagtctgtccagatgcatttagctaatagtgtaatgtagattcatgctgcattgtttaagtgcctttagtctgtttctgaagtcctcacttttattcataaagacatggagaagctaactcatggccatgaatttatactgcaatacaaacaaatgactgatactataatatattcaacctaaggattagagcattcaaacacccatgtatcagaaaacaaaacaatgcaagcacgtctcaaagaacaaagcttaatcggactcattattttgcttgaaggtggaattcataatcctgatattaaaaatttgcaatgttaagcagcatttggaacacacatcagtgtgctctgtttccctgctgtcaggtataaatttgagagcaccgaacagtggattcatactctctttccggcagtaacaggaatttatattgagacttgaacacatggctctcgagcccagaggttttatgagaatggtcacaaaaccagtcattaacggggtggggcagatgtctgatgttccctccagataaacctgtaatggctatatcaccatctatttgcctttgtgtttaaacttcatttctcctcatgttttgggaaacattttagtgaatgtttcagatttgataagaatagttaaaaataaggaagatcttgacactgagagcttgtagcagacatgtcatgggatcgctgggatttgctcattagattgggcaccaagcacaagcgcataaagtgtaaagcaatgtgaactgggttccctgccccgcccagcagtccagctccttgtatctccatgaaagtagttgtcaggtaggaaaatctaccttcaaatgtcaaatgtccttggaaacgggttaaataaataaaaaggcaagcaaaaataaaaacccaaaccataaaataaaataccaagaatcaaaaaacaaaaacaaaaaacaaacccaaatctggcagaacttagttcattacgaacaaatcagccaaaaagtaaatccaaaccatgcaaccgtgttggcacagaactccgggtgatgaccacatcacctacttctcagaattactgcttttctgtatttctcattccctaactttgaaggaaccatcctcaggatgcccttttatagtgtggccaatccccagcccttgattcacaatcacttcagtgcctgattccaacttgacttcagcagggacaggatcttgggcaaggcgctggcacagtcctgtggagtaccactgtgggcacaggaggcctaagtgaaagacccaagtaacactggtccacttagcactctgcttgcgggaggtggatgtttaaagaaactggggagtttgatttgagaggctgggagacaacttgggtcaggacagtgctcgccttgcaaacatgaggacttcagttccaaatacagaactcacaagttaaaaagacaagctaggcaggctgacatgcactggtgctgctgaggcagggacaggacccctggggctcccaggccaacttttctggtctatctggtaagttcaaggtcagtcagagaccctgtctcaaagaaaaactggatgatgatgggggaaatgataccgctggttatcctctgacttatacaccatgcacaactctccaactctctctctctctctctgtctctctctctgtctctgtctctctctctctctctctctctctctctctctctctctctctctctctctctctctctctctctctccctcctggatgcacattgcacacgaatactgtcctctccacacacaaaggcagttttgaaaatttgttctaactcactaattggataagtgcataaatgtagataaatgacccatctcaataaaataataaaatcatttcaccaaacctggctgttaagccaaaggatcaagccaattatgaaggttgttttaagaattaaaagtagggctgcagagacagctcggtagataaaaatgttggctgctcttgcaggggactggagttcaattcccagcaccagatgggtgtggggaccataactgcctaaaacttcaggtccagggacttcaactccattctcatctctgtgggcaccagcatgtccatgcttatacacatacctggctctactcacacatgaaatacagatatagatggggagggagggagggagggagagagagagagagacagagatagagagacagagagacagagagacagagacagagagacagagacagagagacagacagagacagagacagagagcacgcatagggaagtcatgggtgctctggggagcacttccccagcagactgggatgtacaccccaagtatattctgtgcagctggaagctgtgctgtagacagaatgatcttgatcagcaaggctcacatttatgacttaagtttttggttgtgagcctagcctttaacggctgagctatccctccagcccatgacttaagttttaaaagaggaatttggaaatgctcccagatgctgcatctgcccctggcctttgcacatctgaggatgaggccagtgagagagacagcaaggatgactaaatttattaacactggatgggccactcgatctttcagcacagcagtagtaggcgatcctatcagaaacctgcttgttggctgcagatctgataggaaatgcttacagcagtcagccccagccgaatggagacagaatactgcttcctcaaagaaatgagtcccaaaccaaatgttcaaccagagacacagcttctatttccattgagaggagcccatcagctgagacttcctcctcactgcctccattgactttcttttgttctttctccatcacaaaaagatattaagcagaagttcagcatgtcggggagcttgaattccatttttaattatgatgattttgatgtgtggggaaaatggttaagcaggcattaatctcaatatatctcagctaacaggtaatcatgatttacgacaggcatacatgggcagccagtttcacccataagccaactgtttactcttttaggtaaaaaatcaaaacagtgacattgaaggttctagctcaaattacatttcattgcctttacatactaatatgttaaaatatgctattttaccagaattttctcataggttaaacaaatatctgaatttatttaataatataaaccttgtactttgtgtgtgtgtgtgtgtgtgtgtgtgtgtgtgtgtgtgtgtgtgtgtgtgtgtggtcttgtgtgtgtgaggatggccactcatgccatggtaagcatgtagaggtcataggacaaattctggtgtgggtccttgtcactcacccactttgtttgaggaagggtctccatgttgttaatagtgacacaggccagaagagctgcctagaggcttctgggtattctcctgtccccagcttccatgatgctataggagcactggccttagagtcacacgttactatctctggctttaacttgggttctagggatctgaactcgggtccttgtgtttacatggcaaacgtattacccacagagccatcacttcaactccctcggttttttgtttgtttgttccctgcttaaacagaaatgtgaagtctggatataaatcctccaattattttcttttctgagtgcggtcttggtcatggtgtctcttcacagcaacagaacagtgcataagaacttactctttacatgcgcacattgattttcatacttccagataccgccttcactattgtttacagtaagtttgtcaacacttctaagctttgtgcctgtgacatgagcaaacctcttggcttcatcacagtgcccatcgagaggagaaggcgggttcccacagcacggaagacattagcagttataaggtggagataaaacaaccctcagatacatattgtcatcctgcccccaataaggataaatattccttctgaaacttttcacaagccgtggtgaccacatgtgttgtcagtgggcatgaggcattcctgaagcccttccacgagtgggctgcagcaggctctaatatgtaaggatggaggctgcccgaggacacgctttgatccaatgagctctcccctctttccttccctcatgggcttcctatctgccccccaacacaatcctaaagggatggatatgttgacacaatcaggctactattagaaaaaggctgagttcatttttctataaatagacaccataaaaaattcattgttaagagatatcaaaataatagacaacaccttggggcgtagcacttctcaaataaaagtgtcaactacacttacctataaaatctgggtgagctgttccgggaaatctgcagtacccatctcccacaaagcaggttccctctgtcttagcagccacgggagcagggagagagggacccttcctttctagatagtacacaggaggcggaccgttgacttcttcaggaggaagccaccagagatggattgtggtgctgttgactcctatcaccataggagaccttagccgaacaggagctggatggcacaggacacaaaaggacatagaataaaagcaggggtcacacacctgcacagatcacacttaaaggtcaaatcaattgttgtcataggtgcctgcataattctaggaatggaaaatagaatgtagagttgagctcaaagatgactaaacaaaaatgactgagaaatccttaacacaaaacatatacacattgaggaagattttttggaaataatttctatattttttctaaataacagatattatagccactatgagtgccctgggcccctgattatatgactattgacttcataagctccttcactgactcgctctctggatggctctgacagagtggaggctgccttatcaggaaactacagaactgtagttttgaactgtgcccagctatgaccagcatgactaacagaggcagagcctctcgtcctgacctgcactgaactggcactgagcaggtggcaagggggaaggagaggaagggatggcctgacaggaacagggtatgtacttgaccccagtatgtcccccaaatggattgctacgattagtgactttaggttgaaacatgtttacttcatcttattgttttttcttcttaccatattggggttttaatctagagggcttcacactctacctctcagctacgtgcccagtctatggtttgttttcatagacaaatgattttaaaatatttcagcatttattcattgtgtggcatgtgtatgtgtgcacataggctcatgagctttcatcatgacatgcataacgggagccaaagggcaaagtgtgggaaccatttctctccctccagttatatggatcgtgaggactgaactcaggctgcaaagcttgtcacaagtgaatttgcctactgatgagattatattcagtcaaattgagaggaaggcatggactttatccacatgccccatgccctgcataaacatgatctttctcctcatgcctgtttgtcatgagtggttctcacaatggatgagcctgtactgatctgtcacgtcatacgaagtaaaattttccctgtgggttcactgctgtataggctgtaggtttgggaaaatgtgcaacacatacccatcattatagtttcatagaatatatatatgtgaaagtgtgtgagtgtgcgtgtgtgcgcgtgtgtgcatgcgtgtgtgtatgcatatgcgcgcgtgcttgcatgtgcgtgtggtgtgtgtacgtgtgtgtagagacagggcctttctatgtcatctagactgatcttgacattggcctttcaccacagcctgccaagtcctgggaaccaccatggtcagcacatacagggcattttcacttctgccaaaattctgtcagccatttatctgtgtcctcaactcctcgcaactactgatctctttacaatcactatagccttttgcctttcccatggtaatttgggaccataaagtgttcaccaatttcaagatgttgccttctccttagtaacgttaaaatttctctcactgcttccagcttcagcactatgtaatattccattctctgtatgtttttatttatccatccatctgctgaagcatggcacgatagcttccttttaccaattatcaatgaagttgacataaatgtgacgtacgtagaggcaattgtactgttatcatgtcttaagtcctcagggggctagaagccctgtgctatatgctaagaacacatcttcagaagtagcttctccattacacacccatgccaccagtgcagggcaggtcttggatattttaatgcatgtgaaatgacatcagtgtgtacttcctacctggggtacagtgaggaccatctttgtgttctctctctctctctctctctctctctctctctctctctctctctctgtctactttgggaagacagtcattttcatgtgcaatttcctgatttttatcttgggtttacaactgatagaaatgaaagccaacggacaagcaaacaccactctagagatcaaacaaacctatgtacagcaccttacaatgctagtataaacacaatggctgctaagtctggaaacacagctgggtctgaggtgaccatgccactagccatggcctcagacttgtctcagtaattgctcagtgaccactgctaaggcacagtgaaacctggtacattcagatcctggatagtggcaactccttgaagctgctaagagattctactactaaacagtgattacaaactgtccatgtaacctggtgaaagggacaataaccaaaagctgagttattgaaaatgaatgccaatattcaagtatgacatcttttttgtttgtttgagagaaggttttcgatgtagctcttcctggcctgaaatttgctatggagaccaagatgacctggaactcacagcaagcctcctgcctctgcctcctgagtattggaattgaagggatggagcatcaatgacagatggccccaacttcaatgatgtaactttgctttaaacagttgttagcaggctaacattcatccctcctttaagcacacaggctgaatttgagaggtgaaagagaaaacaggaatgaacacaactatagccaaggctttgaccaagaacccaaactatgtttgtgaacttttagtttatatttgtaataacacagccttgtacagaaaagaaaaagtcattttctgtttcgagacacataacatataatgtggcgtgaatccaagtgctgaaacccttaaagtgtgacaggaagctcaccttaagagcattgagagaaatattgctagtttcctggagatgctggccaactttccaaagagaagcagccagctacaactctattctaacttccagaaggagcagagcaaaaagttcatcgacttaaatagaaaattaacaactgtattcatcatctgctccaggaatctgtgtgatatttttaaacatgtatgaatcttatatgcatggcttctcttggtattctccatgccaaaatttagctaaatggggtcttctcagttgtcattctagtaatccaaaacaaagtaacaagataaaccagcctgaacctcttgcatctagttcatgtttggagctgaaactcccttgtataactttctgtggctgtctatgcattgttacaggctcaggtgggcaagaagacacctcatgggtttagtaataattcacatggttttcttcataatttgactttttgtatgtatgcacatgtgcacattcatgtgtgtgtgtgtgtgtgtgtgtgtgtatgtgtgtgtttgtgtgtgtgtgtgtgtagaccataggggactctcgggtggtgttattctgttacttcttgaacactgacagtctcctttgaggcagaatgtcttatagactcggagctagggacagattaatgaggctggacgggctggccagccagccccagaaatactcctgtctctgtctccatggtgctggggttgcaagcacatactacacaacaccctgcattttcatgtggcttctgggtagcaaaatcctcttctccctacatcttccccttttactttacagacaactaagactggtctgagccctttgggtgtatcaattcctgcattgtgcataggattttttcccagtgtttatagcacatgaaggtgacattcttagtttgaaaaattccatccagcccatttccactgatgttcagaagaactctctcaaatgaggattttttttctacatccgctccatttaaactaaactcgacgcttggataagtgtggtgatatcttgcttgtgcaaataaagcctgtctgaggggcagagaatggagattgccactagataaccatagaggtctggaggtctgtacaggggaataactgggtggtaacaggatataagcagtaagaaacaagaactcactctctcttgcctgctgagacactaaggaggtaaggtgtgactgtggctccttccttcttctctctcatctctcaggattttcctctatatttgactttgggttattacttagaccagttaagaactgtatttacattctggcacccaatgtggggcttctgtctgtatagacctccagacctctatggctagctagtggtaaactccattctctaatcctcagacaggttttatttgtacaagcaagataccaccaaagataaacttgaacctttcagcattggaggcatgacttcctttacacaacaaactgactctttccccaagttcatgcatttgactcccttacaattctaccagctgaatgtgagaaagtggagaaattgtggaccgtgccttccactccatctcacgacccacggaacttcttaatcaggaatggaaagaaccaaaacagtaagaagaatctcactggctctgcagttacattttcaattatttctaaaggtgagagcttacttctactcccagtctggagaacaatttataggcaagaaggacactcttctgtggagggtccatggaaattagtgccgactgttcaaagggtgacatataagcatctcagctcacagagagctgttccaccaagcaactggaaggtcttggctagtgtcctccagaggatccactgaactagagctgcttgtccagtgctcaaaaaaaaaaaaaaaaaaacccttaacttccagcttgtatattgtagcttcacacaggaggaggctaaacggcttcttgaagagtgggtatcccactgagtcgttctctacctgagtctatcttctacaacaaggaggggggattgaatggatccgtcaaccaattaaactggacacaaaacacacttgcacacgcgcaagcacgcacacgtgtccacccacccacacacaggagcttagcttaaggagggttatttgtcagagagtcaaaacaaagggattatagacacacaaatatgtttgttaaatagtttgccatcatagaaccacaaactaagagacaattttgagcaaaagaaccagctttaggcttcttgaaaatattttcaccttaatttcttaggctacaaatatttcaaagaaatcatttaaactttatcttgtttgcctgagttatactacctacaaattgaggaagaattctcagtgcaatacattaatattaactgccacttccattcaaatatatagccgagttcttttttaaaattttgtgtgtgtgtgtgtgtgtgtgtgtgtgcgtttgtatgttgtgctgtgctgtgctgtgctgtgctgtgctttccttcatgtgtggtgaataggtttgctcctgtgcttttgtggatgcctgaggaggacattgagtatcctgccctgtcatcagctacccttgccccttgagacaagtgtctttcattgaccctggatctcgctgttgctcttcagctagcctggctgtgcaagaagctctagcaattctctcatctgcactggacttacagacgcccacatgtagacatgtctggtttccttgtgggttctgaggtctgaattcaggtccttgcatttacacagtaagcactcatatccactgagccaacttctcagctccctaataactttatattttataaaaattgttctgaaatgttcagctattcaacttcctttatgcagcatttgttaccctattatctgattaatggcatagtgtaatgaataaatttacacttgcaaaaatttatggagtgtggaatcttaagccagacagactcgtgggtcttttgcatcaaatatcttcatttgttttcaaaaccttgtgtgtgaagtctgtgtggtaagtcattcactatgaccatctacttcctgctgtaaggccaggcatccagacatgaccagagtttccttggttcagtgtgtctagggtatagtctaacatgggaaatccgtaggcactttgtcaaaagaaaattattttgacattttctcaatgatctaaaaccatgtcaggaaagtctactttgcaaacaccacttggcatggatatctgcacgtacactccacgaccagggcctaagaatgaaaccccagtctgtaaacactctgctcagcacccagtgaacaaaaaaggaagggtcttctgtgggagcccagaggtcactccttgctcttattgaccagttattttctgactctagagaacaaaatatatttttcaacttccttcctgtttcctggtcagcaccatgtgaggctgtgcacaatagaaatgtccaaatccaccatttgagctctcttttctctatcatgacttcattgagagacatgattgagtttagatgaacaaaatagtgattctcaattaggaaactaaaatggatacctgacatacaggtttccttagacctcaaggaagctcaccataacccttcacgttccccttcagccctctgctatcattcccttactcagaatgtggcacacaacaccagctttctaagtgtgccatgtcataggaaggctacaaagcatgactttaagaggcctcaaatgaacttggttcccaaacatggctgtcactgcatttcaggtagtggtagatcaactgtccataactaacactgcccaggcctagagagaagagaacccacttatttctgaactaacacactgaatagccaggtaacagccactaccaccattcactaaagtccaccattaatgtaagaggtagatgctccaactgcaattatggcatctttgctacacaaacgtgaagcttttatggggcctctgcaattagtttcttaaacgtatcgtaacacttgcctgtctgacagtacggtattgattttttaatcattttcaagtctcctccagcacaaataaatgtactatagttacagttaatgcactgtgtacacgcattaaacatgggtgtgacacaatttattattttgtgatatatagaatgcgagtggcccatctcagaaagtgccccagtgatttcatatcagtatgggtgttaccgttgtccttggtcctccgaattctttaacttcaaacagcaagagaccttttcttaataagatacttaggccttctaaaaaaaaataggaggggtgctgtatataaatcttttatatatgccagtgtgggagaaaaaaatttaatagcctagcagagaagagagtatattttcctaaaggggtcactgtgggaccaatggagactttgttctctataacatttttgcctatctgattcctttcctggaagttttgttttatttatttacttatttattttggggggtgcgtctgtcaaaatattttggaaggactctaatgcagccaagttttacatatttcagttgttgtttcaacaatctgcagaaggagcagagcgagaacacggctaaggtaaggttccattttttagaggtgatttctgcatgccctttctgtatgcccaaaggccaacaggaagcctgataaaagccacatatccaaaagcagtcctggtccccaaggtcatcacgcatttcacaaagccagccttttccttggtacatctgagcccttaaaagtgaagttggtgagtaaaaagcagttaattttgttttgttagaaataatatcattttagttttagcattgaaggcagatgccagcatttctctcagaacagatggcaattctgtctaatagcgcagctctgtattagtaaggtctgctgtgtatacaaacagtaataaacactaggtaaggatcaaaataaattttaattgttgacattaaatcctggcagcacagactaaggcagcaatattcccttttcaagtctgacacatttactaatgctgcagaagcctttctgaaagctgccaggatccagctacaatggaagtatgattttacactcccagttagtcgtcagccaggatacctgcctccatatgcatgaatgacatgccattagttctgttatcgataaagattattgttttaaagttcccaaagaaggtaacatttaattaagaaacagaagtgtggtccatgcagttgttctattaggggccacattattacacaaactatgtttttgtttgtttgtttttttaccccactaagatctcccaccaaacccatcatgctagaatgccaagttgggcagtcctaaccttctcccaaagtgatacacctttcatcttgtatacccactccacagggctttgagggcaatatcagcttctccagccatgcttgccatgggcttgctgggggtcaaacatgccaacagcacagattcctttctcagaatgcttccaatgatctagtattacatgtagtgtcccttatttattttggggagctgccatgtttaaaaataatcctaacgaaaaacaaaaataacacttgggtcggtttggcttttccatgcctgctcaataacaaacacgtattgcaatcatatttctttaaaaaaaaaaggatgtattttttaatcacgaaaaatatattgctcccaccatatgggacaagcaacgactcagcaaccgatttaagatgcagcatattgagctgaccatatgttccaatgctgttgaatggctgagtgattcatgcccgtcacattctagtatatcaattaaagctccttgaagtctgcatgatttgtgcctctgttattaaaccctgctaattcatcccacttacacatctgttataaatctctaggagtgctgcatgattcatggcaatctgtgagcatgctacagcaaattcttctccttgtaattaacagtaaattgttttactgccatgcaatgaatttttcagttatatcgcaaatgaactcctaaatgtgcgggttttttttttttcttccctaagaactgacttatatcattaggcaattaaaaagtattgctttgaaccaaaagcttttaatcaagagaaatacaacttaaatattgcttaagagccctggcaatttgacatggtgtttgcaagtgtaaaaataatctccattgagagagaaaacaaacaaacagaaagtcctccatgtgcccaggatctccttcatggaatggagaggagcctccatggatggcacatggggaagccaagtttctgcacagattctgttaatctgggaagggccttaagtcacctgtcactccccaatttctcaggctgctttacacttctctcaccgtagaatgctgtctttactcttgaaataaataattggataattagccaagttgaatcatcagaggactccagggctgttcaagtgctcttgtcaaaggtgaagcgaattcatttcagctccgcagatcttccaagtgtctttgattccccctcaccccacacacactttcttggcagcagccttagactcacaagtccatacatcacgtcggtagttttaacaacaaatggaattaaattcaaagaagggaaactaattgaaggacagccactaaagtgtggggcgctgtgcttttaatacggcctgccacatttgcatgataattttccctttttagcatggagcagaaagtgactagcttaatgagggattattcaagacaggaaggaacaaaatgcattcataactgggaacaaagatggcattatgagacagaaaccggcaacctcagagaaggaactggatgattgccttacgcactatgaataaaaaggtagaaaaatatttatattagtattcactaatgactatatagacaagattgttgtaattaaaattataaattaacatattaagagtgcttgtttaatcactctgggtcctattcacaatgaaaagacttatgtccctgcatgcaaacaaggtgggttttctacccaggagaaaggaaatctccactacactttagcttcagagcaaaacttaatgtacccctagttacttgcttgggaggagatgggggagaaaggacatggtattccttcagagatgggggcttctcagcttgtagcctggagccaatgacaggtaaaagaaatgacatggtattccttcagaaatggatctcctaaatctggtagacttggaaaaagatagaaattcacaagtttcctaaatgaaaaggggaatgttgtgtagaagtgtaacatggatttgaaggtctagcccttctagtaagttccccagatgaccaggagcaattccatagcattaactcaagtgttcccaagtgctccatggagattccattcattcagaactgtgcaggtaccaaacccaaatctaacacagtgcccttggagaaacacacccattctctcatatgaaccagaaaatacttgaaataaatcattgttctaaagctttttcataaaatttccagataaaagttcataagtattttttaaatagtgactaacatttgaatgaggagatatcactggtgtggtcccacacttgtaaatgcctatttggatgtatgactttctgctgcatcactattgaatggcaggcctccatccctctgcttcgacttacgagtcaaatctcctgcaaaccccacagtacgctgcctcactgttctccagaaaaaacagggcagggaggttcagaatgcaactggtcaatttacattccttgcagacttggctacacaggaaccctggcttcttcgaccttggtgtctggtccatgagtcttatttagctgtttaaccttaggacatgtgtacaggaagaagcatacacacctactagaaataagagatatgaagggtccagagtcaccagttgctgggctgggctcgaaggcaaaataaaagctaattcttcttcccattgccctgaaaatacctgcaaatggtgcattttacacggaagcaaacatagtgaaacacagtttctcactatcagagtgtaaattgcctttattggcagatgggagtcacctactttgacagcatatactgacggctaagaagaagctctcttttctttattttctgaaagccactgaaataatttctccagcagaacaggaaagatttcctgcaggaacagaagccaatggaatggcttgagaagaaactgggtgaactgaaatgtctgtccaaacttcaaagaatcaccttggagttgtctttacggccgtctccaccgctgctcagtgcttctcacacagcttcagctcacgaggacattgcttctcttgctctctggccatccccttactttcatggtttcccagcgtgcatgcacttgctcagataccctccttcacctgcaccttctcagtctctctgattcatttttatcatggccctccatctctacaggtgattataaaatcatcaacattgtaacgaccggatttgtatgcactgttgctcgctgcttatagctgccatggatgtgcgcctaccaaatgatcaaacataaacgcatgggtttgttttttcccacatgttcatccttcccattttatttaacagaaacatcatggcctaatcaaatatttactgacatctttaacttcttcctcttctgaacctgtggctagtctccctctgattctatccatctcatctgtcaatctccacttacactcattggacaaagttcattggtccccgttgagaaaaaatctgagaatctatgcatatcccttctgaatttgccaccagagatatcttcagaaaccatagatttcatcatagcagtatctagaatagtgccaacctcaaacatgaggacgagtatatttcatatgctcagtaaatagatacaaatgtcttttttaatcaaccaaattcatctacaagagcatcctgtgaatttcctaatcgcctactttatagccattcatcctctcctgtgttcctatagccttcttttcagctaagagtcctagcacatatcctcatgcaaattagtctattagatgttaactccttcatctaaacactgtgtgcattgtattttgaattcccatagattttacatagtgagcatttaatggctgctttctaactagagattttacaagatagtgtattaatggtatgcttggggcacactggtgactttatactcaaagaacaaatttgaaatttgtaatctgaacaaaattttaaattttattttgctttcaatttttttttatcttttatatgtatgggtgttttgcctgcatatctgtctgtgtggctgtacaccagtgtgtctattgcctgtggaagccagaagaggacattgtatcccctagagattgagttacagatgattgtgagctaccttgtggatgctggaaattgaaccccggtcttctgaaatggcagcaagtgttcttaatccctgagccttttctccagctctactacattttcagtgtacatcataatcctgaatggtatatttctcagagaaggaaaaaaaacactttagactttgagattttctggtttgttaggtaaattcaatataatgctacgagaatgaagatgtaaaacccagctcttgatcctagtaacactgtaaatcttcacagcagggacacggtatgtgttcacattggctaacaaacatgtttcatgagatggcaattataataagaagaaaaacttcataggcattctgctgtggtgaacatgtctttacatttgttacacacatcatcttttgaactatagaaacaccatacaaaatttggtacacttacttttaaactggaaatctcagtaatagagataacataaatcccttgagggtctcacagctggtgctctccttagaacacgaaaattcccccacgggcacatttgccaacatctcctgctgctaagtgctgctttgcaaggttctggaagcttaaggagatggggcccaagaaggggcagcagaccacaggaagtgtatccctgaaggttacagtggttcccttagtccctccccacattctgcttccatttaccaggatgtaaatagcatctcccttctacatgcccactgccgtcctgttccatcctagtacatggggctaagtaagcgtgtaaacatggactcaacccactggcacagagacaaaataccctttctgtctttagtcattgtatcaggtgttgaccactgttgtgcagaaatagcaagtctaatttgtaaagagcaaaatccaatgcattctggttcattttccccttttaagtatatttataagatagaaataatagctaagaagaaacaattgctcaccatcccacaaaatgcatatgaattcatttttatatttacttgggaggctgaggcaggaggatcatgagtttgagttcagcccaaactaaataatgaggtcttaactaaaaaaacaataaaataatgcaaaacaaagcataaaagtcatatatcacccacatctaaaatctatgtagcttttagagattatgtgatatttccaggttctatttctctatgataaaaatgtggagatgccaggctcagtggcacatacctctaataccaggactcaggaggcaaaagtaggcaaattcatgagctcaaggccagcctgaactatatagtgagtttcagagcagtcagggctatgtagagagaccttgtctcaaaaaaccccaggggaatataagtagagagatcaggtaaaaaggaaaaagtcagtaagaagttttaatttgtgcttcctttatgactaagtaaggtgacaacaaaccatagtatatgcccccacttcctgcaggaggaggaagtgccacaaatttgaggctagcctgatctatgtattaagtctcagaaaagccaggatctcaaaaaagaagaaggatgaggatgctaaacacttctgcaaacatgtgctggccattcagatcttcagtcaccttcccacagtctctcctgtgacaatggcccaaggattcctcactagggactgaaaagaagctgcttagagcactggctgtggtgccttgtatatagtaggagctcactgcttcatcccacaagacaggatcactggggatggtaccaaggatgccatgattggcagtctcttatacgccagtctccaggatctatctagcccccaaggtcaggcaggtctcactccagttcctttcactggctgtgtctgtaggaacatgggatgacatattttatttacaaatgtgccaggtgagcactaggcctgtgcttcccgaggatgcagatggtacactacagcatggcgaagacaagacttctgctgatgcagagttgttagagatgttatagacaatgttgtcatgggagagacaagttctactaacaacagcctccaagagaagaatgttgaatagaagctacaggtagatatattttcagactacttaagaactgacttcttcagggctgggagatggctcagaagttaaggagcttggtgccaaaattggaggtccagaattcaatctctaggacccacatggtagaaagagagagagaactgagacttccaagttgtcctctgacctccacttatgcactgaacatgtgtatgattacactcgtgtgcacacacacaacaaatacacaaataaatataggcaaaatagtgaaagagaaatctcctttttcaaaaatgggtctaaagatgctgatttgtctgagacccaagtgttttccaatcacaaaaggtatgaaatatgaattggacaagcacaagggaggggtgactatgaatgcagtaacactgggatgacttcacaatgcactggacgacttcacaatgcattggacgacttcacaatgcattggacttcacaacgcactggacgacttcacaacacactggacgacttcacaacgcactggacgacttcacaacgcactggatgacttcacaatgcattggacttcacaacgcactggacaacttcacaacgcactggaccacttcacaatgcactggatgacttcacaatgcactggttgacttcacaatgctctatcactttgggttctggagttaccacctgtctcactgctggtctttctatcccacactctaccagagggcagtctaccttgtggtcaatctctgtcatatttttgtcaatctttgagattgaaaatcctttcaaattttgtcccaaactgggccacttttgccaaaagcagatagaatccacttctcttattcaaacttagtagttttgagtcataacatctatagagataaatggggttatagaaaaagtgggactccaagtgacttaatacacttgatactccttgaatgtacccacacatctgaaatacacatagatcaaacataaattcctgaagaagtctatcactgagataataaactacattgccatggaatttggatttccttcacatcaatggaataactgtaacaagcaaaagtaattgtgtgacataatttgaactgaattagttttcccagaactggagacaggaacaaaagaattagatctacagatagtaggatgattaaacgtatgtttgtacaatacctagagttcatgttggaatcccctaacctctgtacatatagatccatccataaagagaacctgagccttgcaggatagcagacagaaacaatgggaattgaaaacaatctaaatgctgctagtgaaatatatagatggtagtgatatatgtattcaactttgtataaatctagttgacttgcagtaaagcaaacaaaaatgatacaaaccacattctaggatttaacaattattctattacattgtacaaacttaggagattcttattaatcataaataaaataatatgcaagcacttgcctatccaacagatgaaaaacagggcaaccaagaaattgctagatatccccatgggacagaagtaggtagtcccaacacaagaagaaaagttaagacagaggtgagtcctaggtagaggctgagcacaggagccattctcattccatatctatttgggactctccctatgtgtctacaactgttggctccatgttggttttgtttaagaaactcaagacaagcagcattcagggttactgagggagcatctgagccagaaaagacacatatgaagtccaaaatgcaggggtattgcagggatttattttcaatatggatgtatttctttatattcagttggaatggactcacctgatgctagagtttgccctgctcctgaagcactggttacacagcccacggaattgcagaaggagacagtaaaggtgtagatcctataaggctggagtccctttacgacataagacaggtcttgggacttagcagaatgcaacagcttcaaaggcaaaacaataatagcactcagataataatcaatgcacagcctataattttggcattacaaattccatgaattcaggcagagggaattattgccaactcctataaggagagcaatttccaaaaaaaaatatcaacaagacagggtttaattgataattgtacaatcacactgttttatgaggtaataatgcagttcctgagtggataaatgagaaaacggagttatggcttcataaagcagcatggatgtatggttattgtcaccaatggtagagataaagatggcgacatagaaaaagttaccatgaaaaagtccaaacaaagccaacagaaacgtggggtggttatgccacatggtacttgatggcagagcatgggacaaggaatggcatggttctaaaccatcctatcatttgcttaaaacctccacagtagtaaaggggggagaggggatgctgagtgaacattcccttaggtcaaacctcacttcctttcctatccaaataaacacataagttagaatgatagttacattttgtgtaatatagtcatcatctgacattttcaaatgaaagcagagggtttaaaccaaaaagtttgggagaaatactataatcaattaaatagtcagagagaatccatcctatcattatgaccacagccaataacaaccaaccattaaaacttgcctagacagtggacatcacagaggtacaattatgaatgagaaataatttttcttaggactactgacttgtactcatagactagttacacatggtttagtcaaccacagaccagactgcatatgtaattgtggccctttataatcacaaaagccaaatgtttttttactacctaggcacactgtagctttttaatgtcataaggtaagcagtcaaatgtttgtggtagtgccaacatcaatcaatggtaccgtactgccaaggctacaaaactacagggcatgcagatatcttcagtacagaagacttagtaatgttaaaaatgagtacaacatcagttgatgtatttgctatactatatattttaccattgagatatgaaatttacagttataaaaagggttacagtaaaaacctgctgaattacatcagtggcagccctgtgacttgtgtttaccatgacacttgaaactaccaagaggctatgtatttactgacatagttcttaggtttgacattcatataaaatggtacttcacaaatagacacaggttcagattctcacagaatttaatgacatttcaaatagttcttggggatttttcccttcaggagtataacaaagtatcctggggatgttcacctaggtattgacttcaaaagtatatgagcccaagaataaaagaatagataaaatacaactgtgagccaaaacaccactgataaatgtggaatatatagatcaaagaccaaacaccagtcttatttatacatttacctaaataactgtattatggaagatttgtgcagtaagcggtctaaactaaaaagcatgttattatactggatgctgttttatcctgagataattgaaaaagtcacatgtgcagattattaggaaaggacaataaagaatcatgaattcattattgactctttgtttagcccaaaaataaatttcagtgttgtatgtgcatattctgtccactaagacacctcagaaaaaggcaaatatattcatagtgatttaaagagggtcccctccaaaatgcatgcctccctagaacttcagtgtttcatgttttgaaaagaggtctatgtggaagaaatgagttagtactaatcttgcgtttaggattagctttcattctgacagttggtagctttttaggagaaatgtgaaacacctacagtcagacagagtagaggtaaagcaaactgatgaatttgaaatgggaaatatgttggcatgatgcaaggagtgccaccaaccacccggaggaaggaggaggaagcagatgagggcatcctcttgggtacacagaaggagcatggctctcccagcagcttggttttagcctttggaaccctagaacttgagagaatcaatgtatgccctgtaacccactcggtttatggtgattttgaaggcagtgtttgtaaacaaatagtgccaaggttgaaaatcctgtgatttctaccctgtttgtggcagctttagaagtttctggctgtagagatgtctgggatatcactgagaccttttaacagcgttgtcacacctcagcttcttgctctcaacaatatcaggcttccttatactgtctgcagttgagtacacgccccccatatatcctgttctcaagtcttctaccatgtctggtgtcctcttggagaacagaactatggcagtcacaaaaggccttagattcataggagagagatgccaaagtattaaagtgggatcctgtagccagaccactccagctggctgacaatgaggattcaggtaggtgaactcatgacagcctacaactttgctacagcagcacagtttttaaacttacattagtggtgcactaagaaattattcaggcaacttcagagaaagtaataaatttttaggactatgcaatcagatgactattgctaatgtcatctatgtgctaaagataatcttagggtcatcatcaccttaagacaaactatataatccttcttgaaagcattgtttctcagtgtcaataaaatcatgttaaatggatcagataagccggaaacaagtgagtagaggtcttagtaagatgtgtgtctcagagagtaggagattaacttcataaaagattaagggatttggagcatcagctggggttttgggaagccaagatgtctgtgacatctgggacatctatccagtccaaagcacaagaaaaataactgtatcttacattcttgaatgtgttttatcttgcactgttcatcaagaagctagatgtctggtgaaaagacttccatctgaaggtaaatagtcttcatttgggtactgttctgaccaacatgtcaatatgaaattctactacttgatttgtcccagagcaggaatagctttgccctaggctcaggctgcagtgttggctgacgaactgtttgggacattaaacctactaggtccaagggctctggggcatataatagtggggaaatattgtggcatatttatggaaataaatatgccaaggtagaaagtatgcaagagtagagacacaaaaggtgacaggaattctagatactgtgaactatttccttaacattctagggaggctattaggattccatcataccatagcatgcaacagaacagcaaatgattatatatagttctcattggctggaatttttttcaaatatgtcgtctcaaggtcagatggactcaaccaaattgcatcctatgatgcaaatagaaatctaagatttgagcacattccaaagaataccatgcagatcttggaagttctctctaaagcataaagaaaggagaacaccagagctgactacacaggccttcagaggacaggccttcaggcattgcacctgcttacccacaatgcatagaagaaaagtatctcaaggtaaaagacatatgaactatgtgatagaccttggctgctctggtcatggacatgagacaagaccagaagatcagtgttaggaaatctgggaaacatgaggtgcacagattggacaagaattgtggagatgttatctcatgctggtcttcatcaaagactatgtcccatagaagtagaagcgaacagccaggagtacaggatgacacgtgtacttgataccaatagcctctctccatgtatactaccatgcctataaaacaggctaggaaggtaaaacacctcatctctacactgcagagaataagacctcctcgtttcctagagtctttcatagccagtgagctggaactttgatgaagtaaggcattggtaactgttaacactttatattctcatcgctgtcatagacattactagaagacaagttgtaaacatatctaaagccttgagcaaattcattgtaataatagcattcataggaatcatatcaattgataaatttgagacaggtctcaagtaacctgagcagcctcctactcactaggtagttgagagtgaccttgaacaacagatcttcctgcctttgcctttagagtggctgcattgcagagctatgctaccatgcctagttttatggagcactgagaatcaagcctagggcttaacacatgctatgcaaacattttgccaaggggtcacattttcagccctactgccatgctttctgttatattgtaataaatttggttctccatgtcatttcccaaggaaatgaagacacacacaaaatgtgagatggtcttgccaatgtcattttgacatccaaatgaatacagtataaatactgacagattgtggacaggcttaatgcactattatgtgttcaaataatgtttttggattatcttacattgtacatagctgctgaaagttcttggaaaatatttaagactaagtggaaacagcaggtctcatgcaataaaatggcaaccactttagttcagtcccctagaaaaatgggtgataagcatatatagacagaggaccttgaaaactgatgttatgctaatgaacatggcccatctgatgaacacatttggagagagattcttctacagaattctgtaaattgagaaaacatcaaatgaagcgataatttaagtcggaaaagaaacgagctgaaaataaaagtacctttgaacacatcacaggaacatcttgttggggggactgttcagaaaccaggctgatgttgtaccctgtaatttctcctcttgctaagtgttctgctggtttctcccaggagacactgagtgagtgtgaagagagtggagagactgaaggggggaacatgaacacaggtgctaacaagacaaaaacaacacgaagcatagagatgtcatccacagaagatttcaggtctcaccactctagtttcttctaaacactatgctttgtaaaatattttcattttcaaaaattaaaaaatcatgtacagatatatgttatatatccactttaaactgtcatccacatggatgcttactatcttaatattatcaggtaaggcatttttcatttacaaataaaattcagaatgataggatggaaagacggctgagtggggtcaaaacaatcgatacatagcatggggacctgagttcagatcctacactgaatgaggacctgagtttacatcctacacggcatgaggacctgaggtgagaaagctgggtatgatctcaaatgtatctacaatccctgggcagagacaggaggctcactgtggattgtgagtcaccagcctagctgcaggttcaatgagagaccctgtcacaagagagcgaggtggggagtgatacaacagacacccgatggcttcctctagactctgcatgcacacaggcatatgttctcctctctctctctctctctctctctctctctctctctctctctctctctctctctctctcacacacacacacacacacacacacacacacacacacacacacacacgggaacacgggaaactgattgaaacctctctgttttcatgaaaataggtagtgaataattctgtaagaaatctgaataatacagaaacagaacttgtcacagtccccaaagctttggacgcatgatgacatactactaagtttctcatggaagccatgtttcactgaaccaaaccaatgaggctggggcaaacatcactccattaagaaaggaaatggacgaatgatcccaaatacactcacagccttttgtcagtccttcctgaaatgttcaggcacagacaccatacactttactcccagcacccttagataggattttaatgagctaccaaaggtgtgttgtcaaagggtctcattacagtttcccttcccagtgatccttaacattatgagggtccatggatgctggttcatctgttttgtcccatttctgatcttggtctaccccttgcagaactccatgattcaatacttcagctctcatgatcctctagtttgtccaagatggcaagtagcctttgagaaatggtcaaacataaaacacattttatttgctcaatgaggcccctcgacatccatccaaagccatcctcaaccttcacagttccaaactgttaaatttaggtcaggtttaggttttgggtatgcacacacacacacacacacacacacacacacacacacacacacacctgaagattcaatacatagcaaaagtatacttgttttcttcaatgctcatggaattggaagcacactttgtgtgaggaataaaagggaaaattaataataaattagttactttgataaagataccataagaaaactaaacttttgactctcctcctacaccttaattctgattgtttctaagcaaactgggggttagacctttcaatgtattagtttacatgattattgttaataaaaaatgataaatacaaagcaagattaggttaagtgtctatccacatgacactggaaatcaactgctatttggggaaaggtaccacccccacccccggcacacacaaagactagagctacaattaagccttcttccccacaaatgaattcatagctaaatcatctgctctctccacctcaaatgtctctttgaccttaatttccaggcagcactttcaccgaggggtttttaataagaatgcaaagcactgatctttacctgattctcctgttctttctgaggcccaagcagatgacaacgccctgccagccatattcacagctaagaccctaaaagcatactctgtgtgtggctccaagccagagacggacatgttgactcgaggaggctgaagggtgtttttacttttgttggctgactttgaagctagctgaggactgagccaaccactgctctcaaacacgagactttctttagtagatggccatctcttcatgtataattcatatcttataattatacctagaaaagagatagtaaattgaagtgacctactcaaaggggttatttaaggactggtcacataaggctggcagcatttcagtatcctgactatattacctgttgattccttttagtaatctaggtgtagaaatttagtgatctgtaagacagttgtatataaaagcaacaaaactgaatataagttaccatgaaggccatgctattttggggggaaacaaaccaaaggaagtataaatacaaaataatcatcatttattataggtgaaatgaaatatttgaggttatgtactcataatttctgctaatgatgtccagttcttttggggtaattgcatattctacttccagtttgcatattttgaatattggggattcaattgcatatttgatacaagatatatatgcataaatattgtgtagcttacttgtatctagtttttaaccaagcaacaaaaagttttatgcaaaatctgccatgatatgtacataatataaattattaaaaacctaggcatgtgtgtttggcctatgtaccccaaggttcaatttttaagaacacaaaaattaacttaatggaatcaactagcctatatacagtttttttgtattattttatatctttttcttgcttaaaagagaaaatttgcagcttatgggtgccctaacttgtgactcagtcaaatataatgcattttataagcacacatccaattataaacatcatctgtgttgtggcagatgccattaagagcaaagataatattagccttttaaagagcaatttaattgaatggaatttgttcttcaattagatgaaatatcctcttccactatctattataaatagtattttatatcttcagaaatcatttagcaagcatataccttacattcatataaacaaacagagtttccagttttagtatataattcttcattcctgttttggccttctaaaagaaagagaagtctagggcttgaattcttaccatttggttttcctggtggagaccagtctacttggagttctgtggaactgattttccgtattgtaggtggcctcagcctttggggaggtgcttgggctgtggttactataacgggcaagctgtgtaaacagcccccactagtacatccctttacagaaaaacggtactggctgaatggaaccagactccagatggtagctgaggtctcctgaccctcataggagacacagggctcagtgctgtgcacaggtgtgcatgataaaacgtacttctctataggaccataatggttggggagtccagtccaggtaagtgtcacagattcagagccaacgggaatgacataagtcaagtttaagagtccttctgagacctctggctttgtagtataaatgacagctatgctcctcgttgaaccatgcacactggaggtctctatataataggaatatgatgtgtgtggcgacagattagtgtcgaagaagtactgcatatctgaaatttaaaaaaaaggcaaaccagacagtcagaactcacaattgcccaggaatcctttccaattgccttattctcatgctatttaactatgtagtacactgatcaactctttcaaataagggtgtatttgaagcttttacaagggaaacacggcaagtactgggtgcttatgttatccagtacattatgagtaaagtgtggaaaggaacaaagaacacttataagtctatttctgtccctgctttgttcttcacacggtcccccatagaagcacccagaggaagtcctttcaatctcggaaacacatatttgctttcagaacaactgctttgtttgctaaatgctgatacacgagcccaaccctctacaaactgccaccaagcacctgccctttctcctgtctaataccttgactggccccttcctgacctattaaaatgacatacaagcctacatgcattttgctgaatcttgggagatacttgtcaaccatggggaggctgtacatgagaagttgatgaggagcatgtccacacacgaaggacaagcaggtcagggagaagcaagcagaaagcagaggttaagaaacaagacatggcagaagccacaattagctgtgtgcctggacgccgttctctatggagacagcaggcacactgcagacctatgacagaaaggaacgtcagagaggctactgactgctttgtgggattgtgtggggtccgtggaggcttctgtaacagcaatactgaagctttctgtgtatctagatgcccaaggagtaatagatatctggagtctaattttaattcacagagtttttggctttctgaatggaaaggattctgtgctgagaacccatggactgcccacaggacctcttttggttggagcaaggtgactttaaacctctgagaggactaaatgttggatgaagcctagaatgtggtggagtgttcataagaacctgactgctgtagaaaaagcagcttcacctaaagtcagtgtcatggggatgccaaggatgaaactggtccactgcatgtgtgcacctatctatatacataaaatatgcataaaacacatgtacaaaccagaaacacgcactctctccatctctctcaaaaaatgaaaactagaaaataagtaaaaagtaaaaataaaaaaccaactcagctaactcagcaacatgttctcctattctcatagcatgtgggatgtctatcagctatatattatttagggaacaactgaatatattacaatttagttactacctttatgcagaaactttcaaattattccacaatgtgtgtgtctggtggttggttttaatgccaactaatgcagtgtgttattaccaaagagaagtcattcagaagcttgaaggatggtaatatagaggtgtatgatgatggtaagaaaataccatccaatagcatcccttaggactctgggtagccagcagaagtttctatactaatgaggaattctataatggtctcaactaaatgatcaaacttgcttgcaagacaacactattaattttctttgaaaagttcagtgattctccacctataattccaactgccttcatttaacccacagatttgtgttcgttcagctgagtagaaacagtgtttccttttcatgttatttatgctacccaggcactgaagctgaagcaataaacacagattattattagaatgctgcaaagttctgaccgtgctcactggttgttcccactgtccaaatgccatcatgcagataaccttcacaccattaattacaatggttgtcgacaaatgccagatgtggcatttttaatgaaaaagaatgttttaggaaataataccttatttaataggattgtagaagtgcctgattagtgaacgagggcatatttattggccacaaaaccaatgtttggactctatgttagtacagtcatgcaaaaagccctggtgctgtattctttcctatgcgccactttatcgaggagttcgcaacatgctactgggaggaacatgccttgaatggaccactgatgggttcaaattaaattcaaggctgcttggaaaaggcagcctgtctggttgcatctttagagataattcaaccagtagtcctgtcaactcagaaaccatttgcaatatttttataactccctccttcctctgtcactaaagtttaagtttcagaacacctggatcccactgacttttggaagaaaatagacattttagtagcaggtatttggatgctttgccaacgtggcagatgtggacagatgtttgcttcccatcccaccctgcatcatgaagttcagaatttccattaactgcacagaagactagaaacagggaagggagatttagtgtgaagagaaagtggaggacacagtaaggagtagacacaagacacacacgagatgacatttggaatgtaatctgctgacgggtgtaattgataacaacaaaatgtctgtcatctatccaggggctgtgaggtcagccggtatgttatacctggctttcttccacccatgttaaagaaggctacaaaatgtcagtcttttaacttcaatttacatgtgtttaaagctggttatttttgtcacataggaactggaggcatgtgagttggctgggcaggctaaagtacttgttggacaaagctaacaacctgaggtaggtcctcaaaaccaccatgggaagagagaacccgttttccataagttgtgctccagactctgcatatgtgcctggcatgtatgcacacactataataataatgacagcacaacgttttagagagaaggggcgcttaaagagaatgaaacggtagcttcactgggtcccattcctctaagatctcctagagtggttttccaaaacactttgtggttaaaaaggcctagaagcagaagcagacagagctgtaagtctataaaaccagcaaacaaaaacgcctccagtgtatctacaaggatgccatattttaggcatctgagttcataaaaacaacaacaacagtggtttcccaaaagtttgacatcagcaatctcatttaataacttcacaaaagttactgagcccaaaccagttttcttgcttgtgttcctatcctctttctcaatttcagcatacgaggcaatcctgtatctgtgtgaatggggcaatgtttatatggagttatagtgcatgaacaactatttggatcactgttcagatttcaaaatctgtactacctcagaattcaaaaacatgatctgggtactctcaatgtgcttataattacagcacttcaatgacagctggagaaacgagagaccctgtctttaaggacattgaaaagagcaaaattaaaacacttgatgaatttttgtaatatttacttgcagaggaaagtggagtctacttgatgtcacactttcagcctttgtaaactgaaatgtaacaattcatatgtttttatactttttagattttccagtcagaatgtcatagctttcctcccctgatttgcaaggcacacttttttcataatctgtaaagtatttaacagtgtactaggattgattatgctttgtagatatcaccaaagactgttggatgtctgaatcatttccaccattttaatgctacaaaccacataggtatggacatgggatgttgtgttcatttatcgatttttatttgagagaaaatttatacagtaagtgtgatgattccaatgacacatgacaagaaggaaagatatttcatatattttaacaatttcctgtgtgcaaaacagtgaaccagtataaactctcaaagtctgttagtgttctagttttgatatgccaatcataatgggtggagacactgctttcctcttaggaaattcaataatcatttcaccaaacattatacgtcttattttcattgtgttttttatccctaatgagatttataattctctctgcatgatatgctttttgctcacaaagagaattatggcatttgtccttaatgtcagagaatttaactcatgcattctaagaacaccacaatcctattacccaatcctagaactcacggtatgggagttgatcttcagttgtgtagatttctgaaccatccctgaggagagtgtaagacagccagtgggcattgggaaaaacaggtggactccaggagagattgatggagtaagaactctgaacccatcctctgggtggaggttgctgtaatggagctaaatttcaatggagagagcatatattaacaaaagcaatcaataaacacaccaggaaactgaagtaagatgcccagcaaagaggtccttctgattcagggtcactttatcaagaagacatgtggtttaccaagacactaataaacaaagggtatgcatcaccaattctctaagacaaagcattttatctacaagcataagatgcatgtgtaggtcagagaggctgacataaatatggttaggggaaaaccacagggtatccaagcatttctgcaccttagtttaaaaaaaaaatcgcacagatacataacatttatttttccactgaatttaaaaattgacagattctctttaaatttgatatttaaatggtatacttctcctaaatacaaagtcttactttactgcagaggacataatttcaaggactaatatttgctgatataaatagatatgactgtcagaaatctaaacattgttgtgagttcaagcccagcatggtctacaaagcaagttccaagacagccagagctgtctccaaacacagagaaaacttgtctccaaaaaccaaaacgaacaaacaaacaaacaaaaaaaccaaaatcaaaaccaaaatccaaacattgtaaaaatgtgaatccgtgaatctgtgtgcaactagaccaatactttgtgaagggtgctctaacgtttagattgcttagcatcctgcaaatcagaacacaaaagttgactctggaaaccctatcctttgtcaccaccaatttctctgtcttctagaggcctcttcctatttttgagtgtgagctttgttatctccccagaatacacagaaaagagagaggagagaaaaagaaatctgagaaaacaactttcaaggttcaagttccacccactttgagagaggtgacctcgttgaacttgacactaaatgagatggcatgggtccacacagttacacgactgacttttagaaccaaaatccttttgtcaggaggtattttcaaaaatcatgcaaagaaatgaagccattaaaatagttagacactttatacaaaatgtctgaagccatctcatgatcctctcaggatctcaaggtaaaagtcttaattgcattcaaagtacatgtaacatattatattgtcttctaaaaggtatagcaactcagggtatggtcatagccaaacacttgcaggtaacagcatattggtctctaatctcttttgttaacagaattcctaaatgtcttattttcatacagtcatgaatgaagatttctcttgattttgttttcaagttaatattcttaaatgcaactgagctatgaatggctaaaaagtgaatatattatatgcatttgcatacacacacatgcttgcacacgggcacacacacacacatacacacacacacacacagttttgttgacgttcatacatagaagtttaggaaagctatgattcactaggaagcaatataaagcaactatttaatccccaatttccttctgtctctctgacctagggaggtgagcagacttgaaaggatgaaattaagtcacagaaaagtcgtgacttggccagcagagaagcaagaagccagagagggcatcactgctttcattatatgcaatccattgtaatttggaagttatacctcaggatcacaccagggacttcccgtccctctccccactaatcactgatggcattggtaatctagcatcagtatgtttccaggaaataggaaatgcaatcatggtgataatccccgtgcttatagcctgtgtggagggacactgtgagctactttgggatttccaggaaaacattttgacacctgttacacacagacaaacaacagccagaagcagctcacagtttccataacagataccatactaatgtctatctgtcctctcccattcttgtgaagtttgctgtccccaatagctgttgttaacatataaagcaagttgtggattccattatcccctgctctctccctgtcttccccctttctttctccttccccacctcccttaaacgtagagagtgggcttccaggtatgctgttttgccagacagcctgaccagctgtgacatcaggatgctggaactttcccaccattctgactcatgacagagccacagtcctatgaggagaaaatgcacagaacagtatgctgcagagggctctttatctcatgtccaggagctgtcttttaggaatctgaggtaaagtatggatacatgctcttagagtcaacatagaaacaccttccataattataaactgaagactgcaggtaaccttcagcggtcaacttggggcactgtagagtggtgcaatgtcagaagacactaaaataccacatttgggtaaaataaataaaattataaatgtgggatgcagactcatgactaatgaagtagaaagtagcaagaacagaatatcaattacaggactcagtatagtgtgcaaataataactataaaattataatattaataaacaacaatagattagtgttcataaaagtttaagcatggtatatgaaacttgcaataaataacaaatcttctatttgttatggtaaatcacatggaaatacatttgtgagctagagcgactgtttttgtttaaatagtaacatgatgattttaacagcataggtcaacattctggaaaaatctcctcttctggggaaaacaggaaaatggcttcttctttgagtgatttcattacaacagtccactgtcagtgttttattaccagcataatcattccagaaatttcaattatttaatcaaggaaaagcacacagatttcacttaatgtgattaacaaatatgctttagtttaattctgcagactgtgcctaagactttttaaggggcgttttaaatggaggaaagcattgagacccccttctcaggtcctggttaatcacatgccagcactgaactagaatggacttacttttgctgcagcctagtagattgttggcatccaagtggctggcaccaggaacacacatgtcacactttgagccagtgacaaactgtttgcagaaacactggcctgtgacaacatcacaagtttcattcaaggctcctgctagatgacaatgacaaggctggcatctgaaaacaagacaaaacatcaagggaagactgctcatattaataactcatagtgtatgtcatacctactggtaacattgggttgaagacagcttgcatttgccgacgtactgaaaaggatgcttgagctgcacaaacgcaagatgaagcaagacagaacagatctttatcaaaatgctgctcatgcttaaatccgtgcaaagatttctctttcttaatggattaatgggcctcaaaaggaggcccagggagatggctcagtaggtaaaacacttgctgagcaagaatgagaacctgagcttggattatccatcggcacccatgtgaaaaccagctgggtggcaagtgcctgtgactcagcactcagcaatggatacacaaaggtcctggagcttgatgcccaggaagtctagactaatcagtgaacccagagacctgatctcagacagtaagggagtgacctcaaaagctgtccaacaatgacctttgtgcgtgtgcgctcacgcgcacgcacccacacccacacccacacccacccacacacacagtcagacatggtggtgaagtcctgcaatctcagactgtgagagtcagagggaggagatccaggagttcccagttgcagagcgagtccattaccagcctggactacatgagtctttctctcagtaactcccagaaatgcttttacatgccatggtgcatcgtcacaatcagcctcaataccatctaggtaataaaacgaaaactgtgttttcttacaacagaagttctattgtaagctaaatgtttaaattgggtattacaatattatttttatttagatatctagttgcaatatagaatccaaaaacaagtcacagctctccctaaaactcttcaaattctagagttcattccataaagattaaaatttgctgacacaatcagataggttgtaaatagtgttaatgcttaatataagttatatttatgttttgtggactatatcagttacaattttttttttttgtttctgagataaaatatcctgataaaagctacttaaaagataaatggttatgctgggcagtggtggcacacgcctttaatcccagcacttgggaaggcagaggctgacagatctctgtgagtttaagaccagcctggtctacaagagctagttccaggacagcctccaaagccacagagaaaccctgtctcgaaaaaccaaaaataagaaagaaagaatgaaagaaagaaaaaaggaaagaaggaaaggaaggaaggaaggaaggaaggagagagagagagagagagagagagagaaagaaaggaaggaaggaaggaaggaaggaaggaaggaaggaaggaaggaaggaaggaaggaagaaagaaagaaagaaagggttgactctggcccacagttggaggggatactccatcatggttgtgaagtcaaggcagaggaacagggagaaggagctcacaccacaggcacttccagaaagtagatgcctgctgcagcccagttccctttctccactgtacatccagaaccccagacagggaaaggtgccacccacagtgggtacgattttcccatctcaacacaatcaccttaggcccagttcgcaagagattccagattttgtctatgtgacaaggaggattaacactcatttatccagataagattggagaaaatagttaccctggtaatggggcatgttcactgtaatatacaagctctacaagttcttagacctaaagtcaaatgtaatgttggcagtactaactcctcagtggtgatagacatggaaacctttctcctcagggtaaattattctcatgcatgctctccccatggcatttcattagactaagcagtctgggcactagaaagattagggatgtaaaaaaaatgacccactaagaccacttaagcagggacttacatcaaaaacaacaccaaatagatcctcctgtttattctctagagaaaccggtagacatcgtggcttcaccctactgcaaattttatggtgtgatctcttgggtaatcattcaacacccttaaaaaagccgataaaagctaaagctgcaaaataagctgaaaatttgtttgatggaggaatctgcctttgggaataaagtacggtttctcctgaaagtgacagtgccatagttgtcctctttatggtcctgataaaaggacttccctcacctgcaaacaaccctgacagtcttcatctggatacattgcactagaatttcatctgcaatagatatttttcaggcaagttattagagatgaggaaaattactcattggaattaaaatggaattatagcagcaatgaaattgctgatttgttcttaattttattatgtactatcactaacagaatattgtttgtaagcttttaatatagtattagtgagcctgaatagtaagaggcagtcttctctctctctctctctctctctctctctctctctctatatatatatatatatatatatatatatatatatcactcatgagtaagtgcctcttgagtgtttcagtttttattgccattcactcatgagacaatcacacttactttacatacagtgcatttagaggaatggcttgcagtgtgtgacagaattccatcccttgatgaagctctatttccttccaaccaactgctacccacacagctcagagtcagctatgtcaatatccgcgggatattatgttctgaatccaaatggaataaataaatcacttcttaggaaagcaagcaatgttttgagtaattaaatgagtctatttctggttttattgtctcttctcccagccgctgttgtatcgaatacatccgacttattataactgcttagtttcagttggggagacttttccttaagtgaagttcatcagggtggattttctagaatattacagtttgctaccagtgcaaaggacacaggggataatactgtaattaaggcttaaatgaaacgattcctataaatttctcagccactcaaacacaatttcaaacatttgaggactgtttagctcataagccacaagttcgagagtcgttttctcagatgcccctccttggagtaccaaccaaatgaaatataattctcatttattaaaacaaaattagacacaataaaggagaagacatcttaggcttcaaagagaggcaacaaactaagatgaattgtgatattgattttgccaggataaatggttttcgtaatattaatataaagaaacctttattgcacaaactctcctggcacagcccaagctggtcccgcaatctgtttaaaatcttcatttttcatccttatgggaaaacctcagttgctaaatggatttcataaagagtaatctgtcaagatttatatagataaacaatttgtgatgtttattgaccagttcattatgataaacaaaacaggagggagactctgctcatccttgccagcatactgatgctgcccacccccccaccccctgcaaatgagtatttaccaggtacactgaggggataattggcttctgtctcttaaatgacaaatcgcctacaatatgctttcctgggagtttcttctagttatacaaacagcacaaaagtcatcctcattactattattgataaaaaacctaacttatgacaaagacagtgtgtttctgtactcatgatattgctagaaagttcatttggaggaacaaagagggacaggtcaccccttcagctaggatctcagctcacataaacctgaaagtgactcagctaaggagggacataaataccattcactgagatccagttaggttcctggatggcaatccatattgaagatgtaaagaagagtgttatgagatgccctgtcctcaaggagtgcacaggctactgtgaaagacaaaagaagccaacactaaggatgtgtgtaggtcagggtgcagccgagcatgaacaaccgccatgggcggggcctggggagagcacccactgacccttaccaagctgagaatgcaaagactgaaatggtgcaaaatctaaaatattgtgtgctgacagaatgcctccagtgaaagcaaaccccacatcccacagataggtcactgtcagagtacaggcacatttgatatatggcacaaaacaccttaggctgtgtagatagcatgtgtgtgagggagagagaagaagaaagagagggagatgaagagagagtgggagacattaatgtaaatatgtatgattgtggaagtgcatgtatgtgcttgctgaagtctggggaacatgtcaattcaagatagcactgtctgcctttgagacagggcttccaactgaaccagagctcatcaattcttcctggctggctggctagggggctctcaggatccacctatctctgctcacaatgttgcaacaattacagccttctgcccccagttttagcccttgatatgagtgcagggggattagtacttgggtctgaatgcttgtacaatgtcattgttgttttttgaacaacttgacataagcttggatcatttggaaggaagaaacataattgagaaaatgccccatcagactgacctgtctacaagtctgatggacaatttcttgatgagtgagctgcaataagaatataccagcatcagttccagcacagtcaggatgcatacacactgctgtgtggtcacacacagtcagaggcatacacactgctgagtggtcacacacaggcaggatgcacacacacaatgcttagtggtcacacacagtcagaggcacacacactgctgagtggtcacacacagtcaggatgcatacacactgctgagtggtcacacacaggcaggatgcacacacacactgctgagtggtcacacacaggcaggatgcacacacacactgctgagtggtcacacacaggcaggatgcacacacacacacagtcagaggcatacacactgttgagtggttgaagttttactgaatgaaacaccaggagagatgcaggctcagggtggggcagcagaaccagatcaaagtatattgaatgcaaacacacgtcagctttttttgtgcctcactagtttggcgtatgtaattgggtgacttctgaggaagtagcttccctgtcagggctgacctcagctgtatttctgagcagcagagttctcagctgacttgtaatgcaggattctgtggggactggagggccctctgtagcagtatggctttccctaggctaacactttaacctttgtggtgtggatctggccatcgagttgtcccacagcaagcttcttggttcttctttgtcacaatgaaaaatcagtgctctcctggggcttcagttagatctacggtgtgagggtatggggtgaggccactgagtcagtgtgagcgcaaagtcatatttacatggattagtaaagagcgagtgacatcactggcatctgacctgagaaagtgaacagttcaagaactagacacagaaaatctccaggcccgaaaccaggaactcgttaaacaggccatgctaccaacacccttgcacgcatgcaacgatgcctgagaggaaacattccagccacctacaggagagctaagctcgctaagcatcttctggacctgaggccagtgtctcctttgctgacactccatgtcactgctcaggtgcttgagatgtggagtgcttccaggtagaagagagattgcgtctcttctctgtggctacagaagctgaaggaataaaacaggaagccacagggaggaaacttgtttttcaatgtgaagaccataactctgacttggaattacagtgcctgatgtgctcctgccccagacagtggatcttttaaattccataaataggagcagaagttgaggggccatttaccaggtgttctgatggggaggggtgagtaagaaaatcttcatttctcttaaagttcttccttgccgcatgctgctgcaattctaagatgcttagtgggacagagtgggacagtctctctccttacaggttttgtagtatttacctacagaggacaaggcaataaagactccaggttctgtgaacaccgtgttccccactgcagctcaattccactgcagtctgtagaaagtagctatggaatgatgtacaaataatgagcagtattgggctccaactagaaatgggaatcagatcacatttgagccccaagttccagaaggctgacttttagcccaggttaaagtatagtccctcaaaatgtctaagtccaaactggtagaactgaaaatatgtttccttacttggtaaaatgaatcggcaaatatggctaaagatcttcagatgctattctgaccctgggttatccaagattattcaatgtgatcacataggtctttataaaaggaaggcaggatggtgtgggtgagacaaaaaggaaaaaaagtgtgaggagagaggtcaagctcagagaaggtagaaaatgttactctgctgcctctccaggtgaaggaaggaactgtgagtcacagagtgcaagggatcaggaaaccagacatggtttcttcaagagcttgccttgtgagcaagcaagagagcttatgtccaatccccagaagacacattatagccaacaatgaaaaaaacagcacaatcacagcattggggatatggaaacagatatctggggttcactggccagacagcctagcctaaacaggaagttccagtgagaaaccctgtctaaaaaattggggtgtgagtgggtgaactggagaaatgactccattggtaggtgcttattgtgtgagcgtaaggacctgtgctcggtcctggtacctgtgtaacagctggttatggcaacataagcacacaagcccagtgccagagagtcagagagccaaggagtacaagagatatctggccaactagtcaagcctaactgatgattttcaggttcagtgagagattctgtctcaaaattctaggtaggaagacactgagcaaagtacccagtgcccatctctgcccttaaccccatgtacacacacaggaatatgaatgccccccccacacacacacacaacaaacacaatttctccttgcccattaaagaatgcaggtagactatagggggcatccagatcaagacaatggattttatcctggagtttccagaagaaacacaggtggcccctcgacaccatgattttagtccactgaaactaatttaggacctctgacctccggaattatacagcaataaatcctcattgttttaagacactgaatttgcagtaatttattatatctaggagcaagttaatatacctgagaaagaagagatggatcctgtatgtcccgatgctcagctctgtagcattcccaggttgtcacacagaggacacagtgctattaataacatacaaaaggtggcattgctttaggaaccttccacgatctatattaaggtagaataaatagacaggggccataagatatcccactatatacttttccttctaagaagatccctttgtcttagtcttgctgttcactaaagcctgagtctattttctcactcctgaattaggtgtggtctcataacttccattgaaaaacacaagcaggcaaaattagcagtgttcagcatgagccttaggtttctttgtgatcttttcctgaaactgcccctaccttgtggtccagcccaggctggaattggaagatgggaacctggttagagtctgtcacttctgctatatcagatgacagccaactgtccaacagtcacaaggaagcctgagtctatgagaaaacaagcaccagggttcacatcctcactgcccaagacgagatctctttgcaagaatggtctctacttttatttaaagtcactggtatagttctcagagcaaagacccaaggagacccattggagatgggcatacataaagattatcagaccaaatctatgacattgtgttcacatggagaatttctgcagtaaaacctaaaaaaatcccaaggcagaaaaaaaactatctactcttgaagtctaagctttcagattcctgaccagcctcaagctcgggtctctgtctgccacctgagcacaattacactttagtgtgtaccaggctgggtacaactggctccttgaggattaaaacaagataaactcaactagtgactctagatggctttaaacattaaataagaaacattgtggtctgtgattgtagaagttacataaaaatgggagagggtaccagagaaaccgaagatgcctgaactcaggtaaacaaggaccactcccaggcctacttatggatgacaccaggaagctcaaacgtccaggacacagatgaaacagatgtggccctcttttatttttcccttctcattgttttagagttagacaaatgtgataacattttttgctttgttgatttttcttttttttctttttttttgttttttacccttgacagttttcttgaatccttgttttcaggggtggtgaagccatgcttgatgcctgtatgatagataaatgaagcaatgttttcaccaggatcagcttttggaagaatatgaccaggtttgactgatcagtacactctgaagaatgaaacatgagcttaaagataggcaaagacttttccatattggtcgaaggaagccatggttggttgactgtgtggttctgttatcattgctgtagtttaaggtcagtgactatattattttatttatttggcccttgagattatttttacagtgaattcttttatttctttaatctttttttattctaaaacaatcttttctcattttacataccaatcccagttctcacactctaccctcctcctgctccccccatcttctccccacgaactccgcacccactcctcaaagaggataaggcttcattgggaaatatttttaaagagtaatgaaaataaaccaggaaagcaacaagaacaaccccagtaggccttgctcttctcaataaagagacgggaacaagggaggggtggaaaagagtccatgacaatgccacaggtgcctgatgaggaaatcacaggacttcatgaaacacactgtgcttctccacgcccccttaacaacaccagagttcactgtagacgctggaaatcaatacgtttatgctagcaaacacgacccatagtgcacatggtacacaagtgatgtcaaatgattgtctatctttttgtttttaaatgtcaagacatagttacttcctacactgaatatctttatacatctatcctgtaattatttttttgagaaatgaaaaaaatattttcttttagtttctctgcgatgggacttcatgtagcccaggctggccttgacctcactatgtagcagaggttagcctggattttaatcatccttgactttcttgcttctgtctccccaagtgagaggattacaggcatacactaccagagttgcatgataaaattttcttacaccacataaaacccatccactcttcattttaaaaacagattatgttggtgttgtatcgtgacagcaagcagaagtcagcagagccatccacgaagactgttgttcagaaaagaaataggaatcataaaagggagactgtccatttgttcccctctccctgatgagcaaacacacgctggagcaattctcatgtcactgtttgaagtactttccctctatgaccttgtgtgagggaaggtctcttctctaatgactatccatgttaaagtgaagagagatggcaggattcatcagcaaaacaggagggtcagctctcatcacaaacttcccaagtgactgattcccaaaaagcacaaatggatcacgggaagctttatcctggtcgtttctttctttctttctttctttctttctttctttctttctttctttctttttttaaacaaaactgttctgtatataagggttcccatagtgcatatgtgtggcatatgtgtgcatgtgtacctatgtgtgcatgtgtgaacaggtgcccaagtggggatatctgatatcctgctctatcaattctaccctattcacttgagacagggcctctctcaaaacttgaatctagactggtgccatgaagctccagtaactctcctgatacctgtcttccatagcatcacacttagctttctatgtgggttctttttttttttttttctttctttctttttttttttttttttttttttttttttggttttctgagacagggtttctctgtggctttggaggctgtcctggaactagctcttgtagaccacgctggtctcgaactcacagagatccacctgcctctacctcccgagtgctgggattaaaggcatgtgtcaccaacgcccggcctctacgtgggatcttgaggttggaagcacacattctagtgtttgcccagcaggtgttgttacatggtgatccaggactgggagcttcattgtttctattctttgtagagaagctgctgcagctctttctagtgtcagcataaggattatgccttatcatgtccagaatgaaaggctctacaccccagtagagcatcatctatttagagagacacacacaaagctgtttatccgtttagtgcagaggatgaggcatgcctcgtactagtgttaagatcactcgactggggtacaggttgaggtgaccacacactcaacaggatccaatggtggggaatgtggtggctgttgtaaaacacagatctgagtcagtggagaggcatgtaacataggagcagacagcaaagcagaaagccactcagagaagtagggtcttcgacaccaagggaagagatcgttttactaatactgacaactaaaccaaagacacaattaaaaatggtgagtcacaaacagcagacaggagtcagcccttttcttgtctttgatcaaagcatcccatgtcctggtgcatacatatatcccaccgaccccatcctgtcttcaacctggttataaaaggaaccatctatagattctctcatcttccagagacaatgaaacaccctgaagtctttttaaaatcatgtaacaagagaaatagaatttctagtgctgtgtatcaggtcaaccttcaaattggacattaaagaaaacaaaagcaaaataaaaaaacaaaacttttctcccagggttttgtttttgttttgcttgtttgttttttagctcaggcatgataatgaggggacccccctcttgtctgatgctgacctcttttctcacactctcaagaggagcaggtccttactcactggcctggcccagcccacagcaggctgcattctctggcttcgcctacagtcagagtcatactttcaggatgctgtctttggtctcccttgtgttcggagttaaccttgcatttgggggaaaccttcctggcctcctcccatgatctctgtccttccagagattctgtcttataacggttccagatgcccaaggtttgcctctatcccagctactttcttagtctcttgcagcccagaggaatcctgcctgttcctccacctaggacttttcaggcttccatgtgatacttttcacagatgttaagagagcttactccatttttcttcttttttatcctaacaagaccccaacctcataaactctaagtgggttagattgcagaaagatacctcaagcactctagctaagcttggacagactgcctgtccccattcagattagctaggtctaaattgtatatcagcacactggtctccacacaacttcagatgacccatgtcacccttcaacaggtctcctggatcctattttttgactcatgtataagagatatcacagacacttctctcatccctctaaggcaaccctattctctatttatcttcccttaacctttgtttatctattctattttgttacatactctgtctttgtgtctttgatagagataagagttccaagagtctttcagggaactaaggatgtcactcagtggtagagcatttgattaacacatggaagaccatatgttccactccaacactagcaaaaaaccaagtctgttagcccgtgactgtctgtgttacgtgggtttggctattgtgtatacaaagtacagcggatgaggaacagatgggatgacatgaataggaagaagcaagagaaatattcttaaatatgagcaagcagaggagtgataaatcaaacaacaatgcccaggtctaatagagcagggtaaggccatgggaaggagctagcagtgaggagatgacggcatatctgtgtgcagttttatccagtaaaggggccagccactgttaagttagagtgaaaatttgaaaaagcaagaaacagaagggaggatggggagatgaagatgagaatataagaaagaaaaaaaaaaactcaggcatggatcacactcaaaataggccattaaaatgttgttttcttctatgactaggtaaaaattaagaatgtttaaaaaagaagacagattggagggggagagacaatctggagtcatctgtttctgttgccatttcgtctgaacagcagagggctggataatgtacaaggaggggaccaggaagctgaagactaagcatgaaaccaggttgatgagaagcacatgcaagatgaaaagctatgggtccagccagcacaagctcaccctcagtccagtcagtctggggcagcagcaagagcatctcctctaggcctgacctacagccccactgaagagaaagagctcgacagcagaacaataggatttttcctggtctaaaagcagaagaccatgaagatggacacagttgatcaacataggactgggtagggataccagcacaggttaagtgatcattctgggatgacagagttggaacaatggcatctactcacagcgcagcatttctggaatcaggatgatttgagacttagaaaggatagtgtaggggacagtaagccacacctgttagaggctggctacaggtgtgcctgaccactcctgtcaaggcgtggtcaaggtgaggtcaggatgatgaggcatgggctcttaagggaccgcagagcacatggaagccccttcttctcctgccccttctctcgggcctcactgctctgctgcccctggcacgctctgacttgcttttggctggtatttatctcaataaagatatctcgaccttacagattacagtttgtctcttgggtcgcacaatagggtaggccagtattagacacggaagaacttcagcaagaatgggaaatttcatagtctggaattactgatggacattagagatgaaaggagagaatatatatatatatatatatatatatatatatatatatatatatctgcattagttttttataactatagtgaatgccccagacaacttacagacaaagttttgtgggagctcaaggcttcagaggtgacttcccattgcctatggggcctatggtggcacatcacactggtgacacgccatcatgacacaccatgacaggggagcgtgaggcagcaaaacactcaccccatgtctaggaaatgaaaaagacagagaagagactggagatccaccatctccctcaagggatgactacctgccaccgggcctttactatttaaagtcccaccatgtcacaaagacaccaaggtagggtcaagtctttcaaacacaagtcttcagaaccaaacaacagcaatactccaagtactccatgaatgaaactcagaagaataaatctgaaagcactgtggatgtagggaaaaagatttcttctcaaagaacaacgtgtggttttaccaagtttgctctctctctgagtcaatataagaagagtcagctgacatacagatacattcaaattaatttgtataaaacttgctataaaccatcttcctttatatccatactcctctagatctttcctctcctctgtcttctccattccacccttccaccaactaccaatttcactagattcaaagttttaaatgacctcagtatcttcaaatactgtaggctctgtggtcttgtttgtctccttctactcctcatcagttgatgttaatatttcaatctatgttctatcccagagactttaactctggtgttagccagacatcctgtggagtgacaaatgacagaacactcttctgtaagcaggtatgggtcctggaacaagctgatgtaggaggtgtgatgagtgtaaataaagaaagagagagcaggattttacgccaccaaaaacagccttgattataagaacattcaagggtagagattatggtagattgaagggaataacatctttctttttaaaaaaacaagttggggcagggaggtagttcaattgattaagtgcttgccatgcaaatatcaagaaccgaattttagactcagaaaccccacacaaaagacaggcatgtcggcacaaagttatagttccatgtaaggtttccagtgtagtctagcataaaaggcaagtttcaagccagttggagaacctttattataaaggccagctcccttggagcaatacccaaggttgacctctggcttctacctgaagaaacacacacacacacacacacacacacacacacacacacacacacacacactcagacacgcgcgcacgcgctctcaggtattcatgcggtagaaacaaataagacagtgtagacatcccttggtcattgaagagagtttttgatgatattggaagagtatcaaggaagttcagaaggacataatggcagataatcactatgtttagtaggcaagatatcaaggaatcaaaagtatactcaccaggagaacatttttatagaagttattgtttcaaaagtgccaaaattcttgttgataaggaaaactaaagttagaaatcggtgttttgttatccatatgtataaagatttacctaccttccagtctcaggatcaaatctgaagtaaccatcttgacactggtaacagctctgtccagtggttgagggatcacggcaacggcattgcccagtgacaccattacagatatgactcattgctccaactgtgtggcataagcatggcaggcagccagtggcatggccaggagaagtgtaaaagcctagaaacaagaaataaattttgttctcacttctggttcagtcttctctagaaaggatagtgttttgatagcactcaaaatccaaagactctaaagggacccctgggtctcaccataacagtagttagagctcttctaaatgagtatatcaattacaactaaaaacaaccatttagtcatctacataaaaacactgtagaaggctggggaggttgctcagtggttagcaatgcttgctactcttatagaaggcctgggttcagtcccaagcactcccattcaattcacgattgtctcaagcttgaggtctagcagatctcagagcttcttaagtctcctctgggcatcgggtatttgcatgatggacatgtatacattggaggcaaaagagtcactcacatttaaaattaattaattcaaattaaaactaatttaagtctatttgaagaactctcaactaaaaacctgccctcctctactcaggttgaaatggttaccaaataggcagtggtgtatcctatataccagagagatattcagcaagaaggccagataaaaagcaggattcccagttaaaatttagtttaacaatgatttcatagcaaaaaaatgcactatttacaaatacaaaatgattaatgtttgaaattcaaatataatagatcataccgaatattgttaaaattctcaacctttaaactgcctacctcacacatgctctacattttgctaaacatcaagacctaccaccagtacctcccaaggattttaaatcttctgctttccagctttttcacagcatgtgccacgggatggtgtcacagaaggatattcacacattagatgaatattagatgctattctatccttcatgtagattagaaagtgaagcttaggaagactgaaaaactcccctcaaatgctgaactaagaatgcatagcacaagccagcttcaaaaacagcctgcccaacaccagaagccattttacccaatggcaagccctgaccctcttgtcaatctccttgactgactggcttgaacaacctttcggaaaggagatttttaatgtctttttcctctatttcaaagtagtttaatgcctatttccttcaagaaaaatatcaaaactaaaccacggcttcccaccctgtagtcaagacccgcctacctctctagagtcatctcccaagaggagcactgcagagttgctgtttcttttcttgactcgtgaaggcctttctgagaggagatgctctgtccatggcaatggcttccacccacccccctctgctcagttcatttctctgtaagccaggactcctcgatgccgccatgaaatttctctaggcaaattcaggcatgcctctgacagcttcattgcatcttactgcttgctaccagtgcccagaaacatataattaatctaattttcatcagatgtcaccttcatcatcttagtgaattggcatttcctcttctacccatagtaggctttcactaaacactgatgaggatataaaaactcacacaaggagtcagtgagttccccaagtactacacttagaaaatatgcacacaaacacacaggtacacacgtacacacatacacacgtacacacacacacacacacacacacacacacacacacacacactcagtttaaagattctcattttattttgcaattcacatttctttcttatatcaaaagaaaaaagtgggacccataatcacattggagttcttaaagtcttctggacctcaaaggtggatgagagcagtaacaaagtcagaaagggtttagacatctgagtgcagacatgtgaaacataacagttcttggcatagcatgatataaataggtgtatacgaacacatgcacatacctactgagacacacacacaagcacaccacaaagggagaggggtcacagaaaccatctgttgagtaaagttgtagaagatgaaatttatagaagtgttatgatcattaggttttgtgtcatattagtcctagtgaagaggataagcaggaagagaaaaccaggcccacctgtgttgtctgttttattgggaaagcagagagtaactggaagtgtcacacacttgaggatctaggtaaaaagaagccatcatcctggtttctttggcctgggtcttagatagcttcaaaaacgggcaaaaaaaaaatgtattcagcaagaaaaaagggaataaattgaaagatctagaacactcaggcagatggcacagacaacatcattttcagattaattaccagccagactagatggtttatttctctatatttatccttatatctacttgcagaaatagattgtagtcacatcagctacctgttcagctacctggctcactgtgtggttcaagccacagatcccaaagtcttatcttaggtagctaaggaaggtaactggctccttaaattcatgaggatggcatcatgaagggactaatggctctccaatttccataaattacctattagcatagatacttaaaattaatttggacttattgcaatagttatgagtcacagaaaattctctgtcaattaaggatcattttagtaagtaataactacttagctaagtctgggtatacgaacgggggtgcattttggtgtgtaagattgggtagttcaaatcttagacagtaaggaactgcacagaaaagatattagaaacgtaagcagagaacaagcactatgaaacaaggcatgaaaaagcgcaaaagcaccgagatgctgcactgtgggggcttccaggaagcagccatggtggactttgctgtgaagtgagggctcctattctcaagagcttgattataaaggttagtcccaccagtattttagttgtcctatttttaagcagttcaattaggatgacgcagggaacttcctgctcaccgattgcttgtcacctcacctgaatgtgcctaattctagaccattacctctcctttgatggctcccaactatagaaaacaacatttccctttccctcctgcttaaacttccactccggagtgtggcttaatgataactgaccttaatttctttttctactgaatgcatccctgacctcactccattagctcagcttcatggtccagagctttacatctgtatcattttaactgatatttctgagattgttttccctcacaaatgtctttatatggccttcttaaacacagccatcaggccagcgtgctctctttgttttatgtggagccaagcgttcgcaggcacaaaccagcctcgtaaagcattctatcccccctcttatttcagccacctctcggttctgagcaatacaaacctcagagagaagacaaggtgtcttccagctcaaggagagctgacctcacatcgtaaccatgctgtacctggaagggcttaacagaacccatagagcactgcattattagcgagaccgagggtaccatctcctgttgtggctatttgcacagcacagcacctgtcctgggcataaacgagagcccatttcctagcaatatccctcctggggaccatgaacaactaggctttgctaaggtcctgaaatgggagaaagaaaacaaacttaacctctgggccatgttcagaaaaggagggcagcgcttggctcagcactcattataggccattaggagactgtactctgcaccttaaacctcggacacgatgctgctcacggaaggaatctgtgttggaagggctggataatcagggtgtctggatgcagtgccaacagcggtgagtttcaaatcagggtacttactaacgcttcccttcattttggtgtttttaatgaaaatactgctaagagcattttccatacttttgacccagtgttcatgggagtagaaacacgacagacaccactcctcccactgttatttaaggcaaccagtgctcttattaaatcagatacacgcaaatgcttttgcatttggttcctcttttggcaactgtccgctcctctgctaccttgccagctgatatatactcttaaaaccaagctcagattttctctatgaaattctccatgcccccatccttcaagaatccacaggtctcttctacattgcatgttccttgtacttacacaaaccagattcctttgtatatttgtggtcttatgtcttaaagtggctcagggcctgctatatagtagcatattaaatagatgtgccaacagacatggatggacacagccattaaatgggtggataatggacagaggggagaagggtggtcgatgtctgtggttccttaaagcatgaagcgatttctttccctatgagagggaaaatgagtctgtgagtcacaagagtgacttgtcagaatggcccagcctatcagaggatgtagaagcagatgtgtaagaatcagcataacgaatagaaaatgtaactttcggcaaatcatctattggaccaaaggagagatggcaaatatcagccccccataaagtccctggcttttgagaacagacacatggtagaagccgatgccccaagctttgtaccagacgcctctgtttcaaacaagcttggtgtccttatctttgtgagcatctgggaaggctcttgaagctcggttactctttactcctctccccttttaaagacagcatctcactgtgtagccctagctggcttggttctcactatgtaggctaggctagtctggaactcagacaactgcctgtctctgccttcctagtgctgggattaacggtgtgcaccatcattcctagccatagggtattttctaagcatcaaacacagaattaataaaaaaatacaaatgccaaaatctctgttaaaacccaggagattatgattgcacacacccagatatataccgtcaaactttgacgttctgttttattctactgcatttcagcatttatcaaatgcacacttccaagtatcttccctgcaccacagagacaatctataaattcttgccacttagtgtatgcagataatcctatttctagagcctgctcttcacctcttcttcgtctgctcagccaggcagcacaggacagagttattttctttttcatgcctattactcggattttccacaacaaatgagatgtcccagggcctgaaggaacaagccacagtcacatgttgaggggaagttgaagatgagggaaggttacagatatttgcaactatatgtattttaaagtaccctccagtgattatctaatgaatatttaagacaatttatttttaagaaaatgtttcatagtttgagggcacacattctggggtcagattcttgggggcctgtgaatgcctcttgtattgttagattctactctctctgcctaagcaggaggggagagcatcaacgctccatcagagaagtgttatgcatattacccgggacttcacagcaaagctccaaggcagagctggacactcggtaaatactcagcaattattctgcactatcattattgaaactgttatcatgatgtttccacagaagtgagatttttctttctaaattgaagtgaaataatggtgcccctcttccctcctcccacacatgccaaggagtacagcccaaattctccaaggtaagatggttttctggcaatttgtcatgaaagagatgcctgtcctgagactaatttctggctggaaaaaaatgcattgacttcaaaaggttttattgttgttgtttgtttttttctactgagatctgggcgtggccgggtctcaactcctactgatgctctaatgttcaccagagcatcagccacctgattctagttccatcagcagggtctttgtaagcttctggtttatgagcccatcgcttagccaggaggatatgcttcctaatgtaacaggatactttgttttactctctaatagtctatgtgacttacaaaataagaggcaaaaggaagtactgaaggaagcatgaagcatggttctattaggaccccgcatgtcacaagcggccatttcttttataaattaggctttattgtatttcagagctgcatcgccctcagtaaaccctctctgcctctggatctcaaggacaagggagggtcactagcccaggatggcttgacatcctcctctgcctctctcggcctggcctctgattaagcacagctgctgaatggtaggaggtcatccagagctggagaaaaaaaaccagggaaacatatttagtgctgtatttattaatgtgggtatgtgtacgttcatctttatacacacactacaaataattttaaattaaagcattttgaaaatacttaatggaggttaagcagcatttttaacctctgctcaagttattgaatggcgtattaaaaccaacgtggctccaacatgccttccagtgcacattgctgtgttaacaaattgcctataaatttcagctgaattaagcccattccttgtacgtttgtactatggctaggttaataatacatgagatttcattacacaaaccttccttgatgatgctctttaagaaagtggggcaggaatcaacatggggccctctagcacgggccgatttatatttatagtcatggaagagaagcaagcaaggtcttcaggcgtgtgagtgtgtgttctcctggctgagctctgtgtcctgcctgaggcacacacccatgtcgactcttgccctatgatttggggtcttggattcacggctgttcagaaggaagtaggagagcccagacacagctgctggtgaacatgtctacttcatagaaggggttgtgttctctaagcaagtttcattgtaagagacaaaaaacaaacaaagttcaaagtagaaattctgaaaatcagaagatggcaaaacttataatcgccccagttgccctttgccccatttccagggcaggcaagtgtgaacactacatcttgttttgtctcagaaaatgcgcattatttgagctatcattcctcctctcatgtaggaaaatgatcatcttggaatataaggacatttccacaggcctttgctgtccccatgcctaaaaataagcaaaggcaactgagatatttttacacgtaattactcattcaataaatatttatggatcaccatttacagaggttctgtaccatatgcttgacagaaagtggtgagcaacaatgcagagtctcagtggggttggctggttggagagacactaatccagtcagggagcccctggatgctgcaggccctgcagttgtgcagccaccaacttcctgtgtcactatgctggaaagccaggggagggtgggtggacaagacctggctgacattagggaagcaccggtctctgggatgggagagccagaagtccttgaagagaatgggggacttccagattacacttggatagcccaggaaaaagtagcttagactacagaggagtaagtgcgggtgttaagaagtggtcaaaaatctagctacactgctaggcaaaacccccaggactgattgtgatggatgagtcaggagctctgggagaaagaggagtcaagcctggttataatgatacgacatgacaagattacaacccagaaaatgcagggcagcactgccagttaaacatggtagattgagcaatcttccttctcccaaatccccccaaatgaaattatttttctaaaagggaatagcagtcaataacagacatctgagaggaaaaactcagggttgtcagtagaaagtccacagtaagtgtatcgatcaagcttgcacaaacccggaaagtattggcttaaaagccacagaaatctctgcagtcagaaaaggggtgtggtttatcccttaaccaaagagcaggctgttgctctcacattttaggagatcggaagggttagctacagaagttagaaaatgagagaggaaggactcctcacagcaggtgtagtgagctgcattcatcagaaagaccacagaaaggctggctgcgatggataattgtatgtctcaacttgggcagccttggagcgcagttacctggtcaaatactagcatcgatatgcagtgaatatattgggtagatctccacagagtaacaaaaaaaacactcatccacagataatgggttcagtgaactcccagaattattaaacaaaaagcacactagcctgaaaatttccaaaaccagataaacagaatgatagaaatttctaggaagatatggaagttaaaaaaaaatgtgacaggacagctaagccaatggtaaacatgataaacatgaagttaaattcaaaagggaagatattggaaaatcactctccatctttttcttacccaaacctgcccctggtttctcttctccccgaaggcctgtctgtttggagtttcactgatactggttgcttatcttttaggagactaactcctatttcctctttacccaaatagagatgtcacaaaactccttccaaaagggtggggccattgccatccccttttgaggagaccatggaggcaggcatcataactatagtgaaaacataatgatcatactaaaagcattcacacacacacacacacacacacacacacacacacacacacacacacacacacacatacacacacacacagttaaaattcaaaacacacaaaggtgattcaatctttctgcccagtcctttaaaaatatttggcacattatgcaatcactccactctacggtggcacaccaaaactttgtcttagtatccagtaaccaacctttctgaccttcctacacttcctaatgcctattgcctatgttctatcctgtgtttatatgatctcaaaatatcaacatcccacataaggatggtcacacagtattgtcattgtgactctggcttatttcattgacacctgacctccatttctatgcttgttgtctcaagtgacaggatcctattgtctttaacatcatctgatggatggataaagaaagtgtgttctattattacaaaagaatgcttcgttttcctactgactccaactctatagatccatgcaacactcagaaaaagaagtaatataactaaagtacttagagtgagatgtgtatcacaatctctcgcacatgtcttcctccagatttaaataataaacagcacataaaataaatgctagcacagtttcaaaactgcattatgatacatattgatagaggtttgaattaagtcaccttttaagacactgaaacttaatgtttagaaaatatttctggttcactaaataagtgatgggaaattagtcttttaaatgggaaattgtattggaagaaaccaaccaaccctacacatgttgaatatacaattctgtttcaatctacttctaaaagaaagaaattgatactcggtaattagcattctgggcaatagcaaaagtatcctatattggttggcaatgaaaataaaaagaagaatgaaccaaaacattactacaaacagaaactgggagctaggtagaagccagacaagtatgaaaagttgagatcggcttacaagaacccaagtttaaaacgagtgtaatagcacatacagttgtccagccttaggaacatggagacagggatatctgtggggccatctctctctctctctctctctctctctctctctctctctctctctctctctctctcacacacacacacacacacacacacacacacacacacacacacacaccccaaaaccaaaacaaaaccagaagtgattgagttccctgtatgcattggaaagcgtgagaaaaatacagggaaggcatagactcagtccacaaaagagctgtagtcggcccagaatgcactcaagtgatgaatgaagatcaggttacttttgttgtctacatctgtagtgtacattgggagcattgcattacagagcaagcatgaagggggaagcaggatgggagacaggagagaagagagaaggacagaccccgtaggggctccctgctgagggccatgatgacaagtccaagaccagagatgttctaaccaagaaggacataaatgaggcaggcagccacagtgcatagagaaagcaagcctgttcttccatctgcttacctttggcttatgattctctatgtctgttttgacataacatgcagaacactcataaaatcacagtcagggttattaagaatgtcaaaatacctgggtgatgtatcagacagttgccaaaaggagaaggttttgtttcagagttttatcctaaattagaaaacttgtttaaaataggtggcactccgtgtatgtataattcagccagaatgaaaggttctattgtagttgaagataattagtcaaaatatatagcatgggaccttttagatcccccttcttctgtcatcaagaaagaaggatgcagaaggtgcatattcacaaggcaggagaccatactccgaaaatccgacaactttttaaagcaaaacatttgtaaaacaaagatcacaaaatccctttgtgatagcaaaacctcaacagcacagtcgagaggttgctcaaggggaaaagacacagaagcagcagctaatttcagcccattggcctggctctccgcaatctgattcccaggacattcactccttgcaccatgttaaagcagattcctggacacattggtcattttcgggatcctgacatctctggccacgctgaattagctctgaggtagacatcctgtcagaatgaggcaaccagattcccccaacttggaactataaaagggaggtggtttgaaagtccctctgcctacctggacatagaaagtccataggcaacatcaggggcagacggtggcgtaatttccacaggaggagaagaggggagaagggacactccctgggcatgcagaagaaaggagattaagaacattctagtttctaaaaagacaaatgtggtatgtattcactcatatgcggattttagacatagagtaaaggattaccagcctacaatccacaccgccagagaagctaggaaacaagaaagactctaagagagacatacatggtcccctggagaaggggaaagggacaagatctcctgagcaaattgggagcacgggaagaggggggaggggagagggaactaggagaatgagaatggtagaagaggaagggtgaggaggacatgagggagcagaaaggttgagttgggggaagaatagaagaaaacaagaatggagataccatcatagaaggagacattttaggtttacagagaaatcaggcactagggaaatgtctggagatctacaaagatgataccagctaacaatctaagcaacagaggagaggctaccttaaatgccctcccctgataatgagattgatgactgacttatatgctactcgatagccctcatccagcagctggtggaagtagaagccgacacccacaactactcactgaactcaactggaatccagttgcagagaaggatgagtgatgagcaaaggggtctagaccaggctggtgaaacccacagaaacagctgacctgaacaactgggaactcttggtccccagactgatagctgggaaaccagcatgggactgatccagaccccaggaatgtgggtttcagtgagtagatctcagaaatctacgggttctcctgaagtagttcagtacttatccctagcatagatgtggatttgggaagcccaatccacacagagggatactccctgagccaagacacatgggggtgggcctaggccctatcccaaagaatatgatagactgatggtcccctatggaagacctcatccccccctggggagcagaaagatgataggtagggtattagttggggggggtaggggaggaggggagggagtgggaactgggattgacatgtaaaacaatcttgtttctaattcaaataaaaaataaaaaaagaacattctagtttctatgggggtgggagatttctttttattcagttttactgcagtgtagtttcttaaggtaatattgtttagatttacttacatatttcaatgagttttgataaactggtggctatatggctgcccacacaatccaaatctaaactgtaccagcttacctgaacctctttggtgttgctttctagttggtccctttccacagttcccagttcctgggaaaccctaaattagccttgttcttataattttatgtttttctgactttcatatacatgggatcacaactttatcaatctttttttctctcccataggccaacttttttcagaaagtcacacaggagcaagaatctatatttatatgataaatcactccctttcatccccctctcatgtcctccactaccccctcttgaatttatgatctctctttgctggacataatggcataaacatattgggggtaaccaacagctatctccctggacccaaggccagcttaataggagggaacacgtgcctgtttctgtaaacctagagtgtcaaagaccccagagaagaaccaacacaggttcttttcttaaatcaatatagctccagctgtacagtaactacttatactcaaagtcatcaatgtactataaagtagcacttaaattcaaatttaaaaaaggcaatggtctttactttcatcaggaaacaattggaaagatgatttctatacaatgagatcagaactacctctttcattgtatatgacatttcagaacaattctagatgtgtgcacatgacgtcagagtacacacccttttcctgcacgccaacttcatctagaaatgtggtccatcatctagatatttgatatcgtatggaaaattagataaaatttcctttctttagaaaaataatcaccccttttctcagccatttatcttttgtttaaaaatgctcctgtgccaaggtcagaaatgataacgtgcctcaatccagaactgagtctccttccccccaaaacagcatatgcacagacaaacagctctgtttggatgacaaaaatgcaacaatgatgttgaaggtcgtatgttagaagctgcaatcagaaacaaaagggtcacctgtggtcactgcacctaaaaggagccgctttcctacctggctgacactgctcacaccttcttccttgccgatgaggcagacatgggcactggccactgacagggtcacagatgcttccaggtaatgtccccaaggagtcgcactcgcacacctggcacccttgaagattgcccatcgtcaaattgaacctgtgaggcgcacactgatcacagcgcagacctgttactcctgatttgcaaagacactgcccagttgatttgtcacacaacagagaaccatgtactgtcccagtcttctcacagttgcaaggcaaacagaggaatgaatctttctgctgaaggctgaagtacccctccaaacactgattgcactgtctccctccaacattggacttacagacacactggcctgtctcagcatcacaggtggtcccagcttgggagccagccaggctacagtcacacgccttacaagcactgccagccaacccataaaagtcttctctgcaagtgtcacacttaagtcctttggcttccttcttgcattcacactgcccagaaagcggattgcagagttggttcactgagccatgggggttacactggcagggctgacatccgtcatcattaaaactctggagaaatttaaatccaaaattgcagcgattgcatcgaagccctgcaaacagaacgcattcgaaagggtgaggggtgtgggatagcaccagtgacgatggctgaaggttgacatttaacaccgatccaaaccaaggaagagccatttacgcaaacctccatggcagtactcagctcccacatgtggcttgtgagcggtgtgcttagaggaatatcattgctaatcagtgcaacaaaaacaatgcagcacagtacttgttgtctgcacacagactctttcctacttccgcaaatatcaaaactattttaataagataagatttgcagtataaaaatgcacagggcacctgagttacttttctgaaactcaaaattgcctggagagaactagaaagagttttctaggagggcaagcaaagtactaaacagcagctagacagaataaacaggttctaggattcagttccctatcactgtggctggagtcaaaatgggagactgtattacagtgtatacttaaaagctggtacggcaatcaatcttaatatttttactacaaatgttaaatgtatgtagaggcagtagatacaccaattagtctcaaacaatcctttcacaaattgtccacatatcaaaaccccatgttgtaccctgaaaaatacactgagtttttattcgttactatacctttaaaagctgagggagaagaaaaacaacagtggtctcatgcatatctagtgacaagtacatatacacttacttttagccattacaaaattaaataactgacataagtacaagtgaaccagtgcattttgattttaatcctttgcatactctacattttatcattttcaattaatataaattgtgcttgccttggctcatgaggcaagcgcactgcttgtcaaatcatgtgattcgaaacacacctgttcaggcatgatgtaaactcggagccttgtgttgtttctttttagaggggcacgtacatgcattttacaaatggagaaaaatgttttgtcacctaaacttaaaacctctgacaacttaggttagtctcaacaaggacattgccaagaaaaggaattcaagaaaatcaacagtgatgtttagatgcaaatcccttccctttagacagatttcatacacccaggaatgtaaatacctgaccacatggcattgaatcaattgagacatctattccaaaccataatttgtataattgtaataaaaaattagtcctaaaacaagagtcaaatacatacttaggcactgatatggaaaaggcagccctaagctgggggaaaatacataatatgcacgtatatggacaaaaattcattcaaactccaatagaaggcaagttctctaacaatgatgaatagctcacctaaggcatatcatttaatttcaataaggaaaataaaaaaggaccacgattgctgcaaattttaaaaataactgtattgttaacaagaattatgactcattttgaactattaaaatcggtctacatggattcatatcagatcagttttaaaaatatgcacagtgcttatttgaatatgccatacatattcctgacaggtaatctattcctaacgatactcacggaggcctacagggcatcacactcggagctaacaagtgcagggagttagcacacttggcatttaattcccattcttctccctttttattctagatgaatgacctactttaataaaattattggtggtaatgtattttactggtgatagaatcattagtaagatttaacagttttgttaactcaaacagtttgccttctgaaacacacacaacacatcgtgtgctttcagggtttttgtttgttcctattaatgaggtaatcttcaacaaggatggttgctaaccctattaggaaaatatatattcatgtcaagttcgtgtttttattaaaagtatttcacttgcagagattaccctagaaaccattatttataatattgttaaagcgagaatttaatcttgccaaaatacatatttatgttttcctgcaggacactacttgcagcaaccaataaaatgagtaaatgacaatagtaaatgacagaagtcatgacgaattttaggtaattaaaatttctttctttttcaagctgtaggatctaactacccaggaaaggtgttattgagatagagaagccccactccattgtgtacaaaggcctgggtttaactcgagtttctatatcttgaatttaaaacatgtctctttaccaagaacaaagaaaggcacacaatgaattctacatgccactcctccagaagacagccagactttctttctaaaaattggtgtttgttagttaccataaataaaggtgggagtgatgttgcacccatttctataatcttttcttaaaccagagtgtgtttatgtgatgtcaccagaactgtccatcatcttttaattggattaattaaaatgtttgtatactagagctgtagacttgtgtgtgtgtgagagagagagagagctaacaaaacagattgggttatattacataaatatatacataattcagaattacatgtaagtacatgcctatacatgcatatgtatgcatgtgtgtgtgtgtgtgtgtgagagagagagagagagagagaggcacatttattattttgaagttcaggtcagcgtcagtaaaaccacacagcacttggtgtctgaagtgacaatagaaatgccaaggtcttttttaaacttcatacaggaaccagggcatgttcagttagaatacagtgtgcactttatcagcaaacttccctctcataatattctcatacatcaacatttcaaagtgcattatgtacatggtgcgttttgggcacttgataaattttgtccttatgtggcggtggttcccctcaaaaatgctggatgtaataaattgctataatcaaatctaatttctgaaaaatacctgtgggagtaacaaacaaaaaagcatgtcttgtataaaaaaatgataaataacaccaaagctcactgtttattataatcagcttggtacagaattacaaaattaaaattatgtgaccctttataagtaactctagccataaacatgatgtgtggaattatattgacttgctttgcatttcatagggacagttcaaagaaatataatagaaaaaatggaaagatttatcacaaagtaccctttagcacagaatgttttgaaaaaaatccatttattttagtctattaaaactagcagggaaatgatttgcttagaactcattaagtgtaaaacattttgaaaaagtgctaattttctaaaagaaacatctatgcagcaggcaaattatatttttctatgacttattagttgagtccgtgtgactaatgtatctgctgaataaagaaacttctaaagggttgattaaactaagcttcaaataacagtttgatacagttattaattgagtcatttttagacagttaattccaacccaaactgttttttccccagccttgagcaagaaaaccttctttacccttcagttaagaaatcaaatagaggctttttttcccccaagaagagaatagaaatgtgactgaaaacttgtgcatcacacgtaccaataacatttgctttgcacaagcactggcctgaattttggtgacaggtaatgtctccatccacagtcccagagggattgcagttacaggggcggcagccatcaggatccaacgcctgcaggtcatagaatccatcctggcaccgaaggcactgtctgccagacacatgtctcttacaatcacactggcctccaatctacaggagatacaacattttgtagaatgatgaacatatctatttttagataatttgctcattaaatacaagacaaggagtgaaggggaaaaaaaatcttgaaatgttaaacagacaagaagacgatcaggttgtgcccctcatgacagaaaacatgggaagcttcggcagggagaaaatttagaagtgaatgaaaatagacccatggaagtcagtcgtataggactaaaagggaaatggggaattaagcatttaaactctatataaagaaatcagaatatagacatccaagtcctgaaaataggaaagagccagcagctaacttaatcttcacaactccagctcttggtttcacccttttcatttactatctagttggtccaaatctcttttaagcatttaggtgtttaaattaacaaaaagaatctcactatgatgagacagtcccattaagtgtgaatgttattaaagtcctttgcagataacagcacaaccttaaagactcaccctgctatgcatctctacacactcctctttgaggaatacttcaatgttttctcactcatttgtggtatcatttcacaggatgtgtatgtcatggatagctaatattgttggttatgcgtgtggtttcaaatatctgggaaagaactttcaggctaaagatttaaaagaatcattgttgcctcatcttccctcatctgaaaaaagaggtcttattagaatcactatttcaagataaaacaactgatgtacaaacatctaagttgtaaaaaaataaagtgttagatagagttgtaatggtccccaatacccaagactgagtatagaaataggggcaggcatttggagaaggctaccttgtaactggctgtacctcacatctccctccttgcccagcctcacagaaactatgaaattggctaatagaaggagatggcttttcctgcaaaagtaactgtcatttactggtatgcattcattgcacctagctatgaaatgcaaacgtcccccagttttctactgctaccatctcaaggacatccctcagtaactcaggcctgactttgtgctggtgtttaaaaatgtgtgaattctcctctctaacaggcagcaagtaccccagaagcctggacacatgctgactgtaaaataatcatttacgtccccatacattaaagaccaagaacaatagtgacaaaggtagaaaatcaatgccttttgtgtcaaaacgttttcttttgcatatttgttaagtgtttaatttaaatatcttatcaatatcagttatagttcaagccactgtgaggtcttcaggagtgtgtaaagacctggtttctacattctaaatggtctctattgtgtgtcttctctcttcttttgctctgcccacaaatcatgtctgtttttatctttacgcatgactattaacacttttttatataatattcccccaaatctaaattactgccttgagctttatcaaagtattttgtccctccaaataatggtctccatgtaggccactctggtgcaaattctgaagataatcactttcagttcattgattaaaaactgttgtgtaatacatacaaattaaaattctaccatattggccataccctaaaatgtagtttgaaaagaaaatggtataaggatttataattatataaaaccatctacttgactcagttacttcaaaattagctgaaaacacagtttattcaagcatttcattgtgcagatacatttcaacagtgagaaaacataaatccactccaattaacccctgcccatccgtatattaaaagaagatcctgtcttcccttttaaaatatacttataagtcaagaatgctggaggctcctacctggaatcccatcatttgaaaaactaagttagcattgtcacaaattaggagtctgtctgagtgacaataaattggaaaacagccaagctacacagaaaaatccttacttaaggtaacactttcaagcaaatagtttctatgatgtttagtgaaaatctactcttaggttacctactgattatctttggacaatatcttagcaaacatgttatatacaggggcttgaacatgtatgtaaacctgggaattcatcttctctggttggacttaaggctgtaagcttgccttctgtgcaagctcctgggagggaattagtggacatgacatgaacagtgacatggccacattatctttattcctttcatgacagttaatagtctgtttgacaatcagcagacatttaagtccttcctaggtcaccaactgcacagacaattgagagatctcaataaagtttgcccataccctatagttctgaggcgagcaatggattcaaacgtttgaataacttttctttagacttacgtgtttttagttatgtctgcatttgtgtgtctgcatattgatatgtgcatctgagtgcagatgttcacagaggcaggaaccagtggatctctctggctagagttccgggaaattgtgtataatctaacgtaagtgctgggaactgaacttgggttctttgaaagagcagcaagcattcgtaactactgagccatttctccaggcccagttttagtaccttaagcagcaaaagttatcatatgtaacctactgaccacaacttaattcacatcctatttccctgtcaaacaggctgagacaaaagcaatttaatcactacaatcatgtggccaactaacactgagcttcccagcaccaagaagaaagaaaaacagataaaatgctacaacaattaacaagaacaaaatgtatcctaaaattccagggccacggtcatttctttgctcttcaaggcttaacacactatctagattagttttggtatttcctgaaacctaatttggtcttgaacactgccagaaatactcacaaaagaaaaatattacccactcacaggctctggctcaaatttgaaacaattttcttgagtatggcttgggccacattcttcccggttctacaacatgttttgtcttacttagaaatcctctctaaaaggcgtttggggctatgaagagaagagcccactaaattcttccagctcagcatcccaacagtctgggaagtttggttgatatcccccctttaaatgctttggaagcaggttcttgctacattgtcatgttggttttgatcttcccacttcagccttccaagggctgggactgcaggtctgatcctggctcctgatctcccttctgactgttctgtgatcttcaggttatttctaatttatctgatcagttaatgaactttatatgattcaaataatttacagtctactgaggtgtgtttgatggcccagaattgggtttattttggtagatgttttccacagacttcaaaaacatgatgtgacactcagctgttgttggactgagtattcaatgtcaacgaggtcaactttgttgatagtattgctgtaatctatatactcactgattttctgtccatttgttttccttggttattgaagacaaaggggtattgatgtttttgaatgaaattgagggtttttttttctatttttccattcagttctattgatggctgctttctatatacagttgttttgtttggcacacaaacattaagaattggtagggcatatgattaaaatgaaaacaattcactttgcaatatataattgccattagtatcctccatgaaactgttgtggtaaaatctgtgtgtcctaaaattaataaaggcactgcagctttcctccaattcttgttggcgagctccgtttccccacagcttacatttagcctatgtgttgtctacctgagctgtacttcctctacaccacatgtggttccaatttttcatttaccagaggactatgagaatggggaaattggacatggtcattgctatggcccaaatctccccacaatcttcttcctattcaaaatcatcagcctgggcttcctcttctgttgtctcctaatttttatcatgataatttattgaatccatttgatgtccacaatggcttactgaatgtaattttcattttatgcctgtagtattttttgtacatatttacacagcctacctgcaaggaaaaaaattattccacatgtggcctaagaccctggtagcccttccctttctcccttttaccattgccatggatttttccgcattgcaatctctttaaggaggtgttgatttggtttaaatgtcgtattttcccatagaagagagttaacatacaggaaagggagttcacaatagtcacgagtttttggagcaccttctttctctgtatggatccatggaacacatagagttttgcttcctctgaagtgcttttacaaaatgtttctgtgtggtgcagtcctgcctgtaagtttctgaactgtgcaagtgaacttcatcttcttctcaaaaggggctgccatggacacctgactaagctgtgccactgctttctgtgtttccagaggtcctccattgtcttctcacttgggttgtgttagcagaagtctgctgtcctcctatagttatctctctgtgtgtaatatgcatttttcctgggacacttgaacattttgttttttatcactagaggaaacaacagtcctgaggaattggatgattatattcctatctgtagctttctttgtatttcttatttgtgagttttactgaccttcttgggtctatgacttcatggttttgcatacagttctggagatttctagctattatttctttgtatcattttgtctgtggcaccccactccctctcccccagggaatcaagtttcactagtcttgtagatttgcctgacagctcacctgggcctccttctgcttttctcagtcgtcttctatctctatgcttcatttctattgcgaagatgctaagttcttaatatgtcgttcaacagatagttaccccatcagttgcagccagcacatttttcactgcatacacttcagtgttttcttatgtaaagtcttgttttccaaccttctacttccccgtgtagcgtttttttaaagcatccagaatagttaggatgtttgttgcaatattgttacctgacaactgtatgtggcacttggcttctgaaacagtttagtttatttgtttatctttattattgttatattaaattttcatcatgggatgtgttctactttgttgcatgcctggcaattttctggctttctatgactgctaagctccctcatctttaacacccactgtaaggggaaatgctgaccatacccttttggggctggacacaggtgacgctgaccacgcccgctaggtggtgacttagcaaggttttaaatatcagagacggaggtacgtggccctctttttccctttcctgcctggctgagcaaaagagcaggcatcgagtgtaaacctgatcactggctccattgtgtgagtactttcttaataaactgtgatcaatctagttctgactccacattgcgtccagctttaagccgcattggttttttccccaggttttcacacataaaatgatgaacattcatgtgaagacttaaagaacatactctgtgaacccctggcatgactcctctgtgttcttctcctctttctgaagctgtgactcctttggattcctgaaaccctttagttccttttccgtagcttggtatagacatatttacaaggaagccatctggggaaattgtagaactacagaatttagtctctatgcctggaggacattttttttcattatctaattcttgaagtcttgcattcaattaatataattcttctacattttggtttcttcaggtgggaaaataaattgagtttctgtttggttgaaagtagaagatgcatgaagggtttatacaataacaccccctcactcctaaaacaaggcaggggggaaaaaagcgctgtaacctaatttaaaggaagagaagatgaaaaaattcagaaggaatttattagcaacacttagcatatcatggagagtgttgtattgggaaacatttattcagatattttacataagctttggattttgaacccaagtaagagagactcacaggaagcctggcagtggtatctctgcttggaattccaagggatgggaatggcatgaatcaaagttttacacaacctctcacctgatcaaaatttagactttgaaggcatccaaactaagatcccaaatcttcaactattcagctcacacaacacttccttaaagggaagttctggacactaacagaatttgcacggtgacttaaataagaggcacacagggcatcctcagatgttcagtaagaagaaattagggtacatggtgtgtacctgctggctcctctagagatcaacagattaatataaaatttgcccatgaggagtttagaagggctgaaaagtaaatatagttactcttttttctcgaggaaatatggatagtgagttttgattgttgtttgaaaagtacacatttaaatatatatgttcaaaacttaaaggttgtttgttgtggtggctctatacttgcaacatccaggaggctgagacagggtcacctggacctcttgcctcaggtcaccacctaactatttccttcaggtattatgccaagtattaaccatgcaacaagacatgtctacttacacaaatgaaataaaaataatcctctttaaaatggcattcctggggtgcctacctcatctggcttcttccatagcacttactttgacaaataaacccagacctcttatttttatattatttgattgctttctgcctgcttcccatggcacattggaacagaggcatggcaatagtaagggtgatggtggtttgattatttctgagaatatcctgatcttgggagtatgtgtgcctgtgcatgtgtgtgtgtctttgtgatatgcacctatctactccttggcacaggggtcctcactgaacctggaactaaactgatggccattaaactccagaaactctccccgagccatcccacaccacacaatgctaacattaaaggcatgatcatggccatgtctagcttttttaggcatgttctgaggatttgaactcagttcctcatgctagtgtactactgagccttgtcattagcttctttgccaaagaagctaaacttgggatgattgggtggtttctggaaagtcagtcagaaaggatcccttacacccaaagctatgctcacagtcaccattctggatttacccagaatactaggctgcaagtccgataacaacaacaggaagggtgttagacccatggaaggggaacagcttggcatacacctgtcaggagatgacagcacactggcacagtcagccaagccttgcagctttgggtacggaagcccacagcagtgacaatggccaacagtcttaccataccaccttgtgatcacacccaaggcctctccaactttggacaagatcaattatctcaggcaaggggcaataatggctaggcactgaagggtgacaactgtcaccatcaatttgtcagggttattagtgataacattaaaacagtaaaatcttgattttttaaaaaaaaaaaacccttcccttattaactttttcacctctttccaatccccaaatgaagtttctaacatagtaaattcaaggtatacaaaaaatggcatgtatttgcttaaagaaagcagaaagcatgatccttgagattataagtgaccacagcattccccattgtttctgtcattgtcaagatgaaaagcaatgtcttcataagcatacatttggctggtggtagaggaaacttaatgttctacagatgacatcgtccacagaactccctaaaagccaatgaggtaatggtgatattgccaaacaaagaatcagaaaagcaaactcaagtttcaagatcagggtgccttccttgataactcaataaaatctggggagttttgtctgggcaggcaaagtacaaatgctgggaagaaggaaagaaaactgtctaatcaatggaaatgttctacaaaatgctatcttctgcgtaaaggatatggtggctttgcttgtagaaatctagtcttttgttggaatgcaatgtgttcaagttgtcagttattatacaggagagtgggctgtgcctgaggttacaagctctctctctctctctctctctctctctctctctctctctctctctctctctctctctcgcactggcgcgcgtgtgtgtgtgtatgtgtatgtatgcgtgtgttgtgtatgtatgtgtgtgtgtgtgtgtatgtatgtgtgtatgtgtatatgtgtattgtgtatgtgtgtgtgtgtttgtgtatgtgtgtgtgtgtatgtatgtatgtgtatgtatgcgtgtgttgtgtatgtatgtgtgtgtgtgtatgtgtgtgtatatgtgtatatgtgtattgtgtatgtgtgtgtgtgtgtttgtgtacgtatgtgtgtgtgtgtgtgtgtgtggtgtgtgtgtgtgtgtgtgtgtgtgtgtgtgtgttaggccgactgtcccaaactgatcgctagcaggagagccatccattacttcccaggactgaagcaactcaccgggtcacagaggaggtcaccatttctggtccctgctcggttacagtcacagggcttgcagacatccagggcagagggatctgcaccaatgggtcggtaaaagtaatcctggcatgactcacagtttctccctgtgttgggataggttatgcattatgactcataattcattacaatcggctgcatgattcaagattaaagactgtattcctttgagggaattctttaattttcgggatgtccatttgaatgcacctttcatctctacctgccaatttagtgatctggagcagatgaagcagtgaacctgttccaaatggtgctttactccattaaacgcccatctggtatgcgataccacatttctgagaagttttgcttcggaagggagcatacattttaaaaagaatccatttctaaacttaaaattgcatccctatggccaggcactaatttctaaaggaaaatgtgaggatttgctacacacatggcagatgacatctacgtaagcggaaggaagcagctgtgctgtattacaaatgtttgttgagagtcatggagctagtgtagttggtaaggtctttgctgtgcatgcaggaggacttgaatccgttacccagcatgcacagaaccagtcaggcacaggggctggcacacaccagttacccagtgacagatgagtccctgtggctcactgaccagccagtccagccaaatgagtgagttccaagaagagagagacaatgtggagggtggttgaggaaaatagttgatggaacctctggcctccacatatatacatgttatcagcacacacgtacacatgatcagcacatatatccacgtgattacacagatgcacacaaaaatttttataaagatgtatttttcagaagtaaactatggcaaattggagaaagccaatctgatggattcttttgcagttaacacattttaatacttttgctagttactttgtacttcaaatatcagataaggaaattataattatacatgccacttaatcttgcaataagtattagaagagcctgatgtttctagtgtgcaacgtaccctatgcctttcagtttactaaggagcctttccgcttgacattttatgaataagaacctacgctatgagtaatttccagagtccgtgtggatagtcccaaaaccattggcagaggctgaggtaaaccatcagactatcagttttcccattaaaaatccatacactctgttcagatgttgctagaaatgaacccaatatcagaaaactaggtaatcaacaatttttcattcctatggatattagcttctaattaattaaaaattaaataaattcacaatgttcctagaatactgacattcatatgtgttgatgactcaatatgtatgtccactctggaagctgcttttctgatcatcacaggaatactcatcttcatatcacccataccttgtctactttaggtcagcaataactatgtaattcattcactcatgccccagggtaacactttagggttcattatattggtattatatttcacaaatactgaggctgcctgcttctgcttccatgtcaatactgctttgcagaaaacagtgattttaataactgctaggaattacttatcatagaacctacagagaatgtgaatcatcttttacatttatgacctttttgcagtgtgtgagtgtggtgtgtgtgtgtgtgtgtgtgtgaggtgtgtgtgtgaggtgtgtgtgtgtgtgtgtgtgtatgaggtgtgtatgtgtgtgtgtgtgtgtgtgtgtgtgtatgtgtgaggtgtgtgtgtgtatgtgtgtgtgtgtgtgtgtgtgtgtgtgtgtgtgtgtgtgtgtgtgttgaacattgtgtactactgtgtgtctctggggttttgaggacaactttcaggagtcattcctcaccttccactgtgtaggttggaagatccaactcaggttttccagctctccagtgagctccctttcctataagacatcttgttggtccatatattgataaagtgttaaaaagattattggtttctgggcaaagtctgagtaaacgtaaaacacacatgtgtgaagccagacacaaggaagctaggaatataagcaacacaagtaacttactgtaaggatgcattcaaactgagctaggctaagttatccaagttacttgtttggtcactggtgtgaaacccttcagagcaacaccttcctgcaaacatatgatgaaggactatttctgaatggaggtttgatgaaacaacttctcttttcaaacttaacaatatgagagctcattcccaaacaggataactgtatcatcatttaaaatatcatgcatctagacacagacacccatggccccacaggctgagccagtcattcaagatgtgggattacctgttgtgtggtgctggcagttgtcacagactccgcctcctcccctgctgtgctcaagaggaaatgggtccacagaagcatcatagtggcagcttctggcatggttgttgcactgacaaggtttacagttgaatggatgaacaccatccccactgcggaaaggcttgtcattgtaaagtggcaaacagcggtcacactggaatgataaaatgacaaaagaaatacagaaccatgttttcattcacgtgcccatcactgtcagtgactgtcaaattaaaactcgtaagttaagaacctctgactgctttgtctttaagactgtttaataagtcagaaaagggcgtggttaggattttcctacaacctttaaaattgtgctaaaatattaatgtatccccctatagtttcaaacttcacaatgaactgggaaatgagttgctctctctctctctctttgtaaagagtctcagagacaacacttcgaagagtgtttgaaggcctttatctcatcccatgctttggtatgcctaagacatgcttccattgctttgacgtgcagatcaccatgctcattctgtttcttgaacacccatgttgtaagtgttgtagaagctggcactattgaggaggtaacaaaacaaccacttctctgcctgagacaggaaatgggaaccctgaacgtgggtgtcagtgaggagaccttggaaatctatgggacctcctgtagtagttcagtacttatccctagcataggaatggactttgggagcccatcccacagggagggatactccctgagcctagacacacgggtgttggcctaggccctatcccaaaggatacaacagactttgaagacctgctatggaaggcctcaccctcctggggagcagaaaaggtatgtgatacatagggtgttagttgagggggcaggggacaggggggtggagagggagagggacctgggattgacatgtaaaataattttctttctaattaaaatttaaaaaagaaaatggggtggaggcatgcactggtggcacacaactttaatcccagcactcgggaggcagaggcaggcggatctctgtgagttcaaggccagcctggtctccagaccgagtgccaggataggctccaaagctacacagagaaaccctgtctcagaaaaaaaaaaaagggatcagtcactgatcctttgtgcatagcttagatagcaatccaaggactgaaaactcatcaactgtttatgtccaggaaggaagtaaaaaaataaataccattgatgatttagggcaaataaatccaaagagctgcaaatgacaatctctctttgaatttgtatggagttcagcaaactctccctttatatttttagcaaacaaacaaaaaaataaattctctattctgttgtgtttctattgcaccatatactgaacatccgtacattaaacaaagcctggagggttttatttttctactgaactgagaggggagcaaacagagaagaaaatatgaatgttacataaacatcttgtcacaatgttcaaatatagggggttgagctgtagttactcataaagaatgtgcccttgtatttcagtcagttttcagggttctataatattcttatagtgatgaaatccttttagccataagcacttctatgtcacaggatggagtatctggcctttttccttctcccactgttgtctagagatggccatgtgatacctctgtcctctgtcctctggtgacacctgtgtcatattgctgtccttctgcattgctgccttggctcccttaaaatcctttcccaagagatgctagatagctatttttttttatactgcacacactgtctacatcataggagcagacaggtattgctacggtggtaattgaaaattggcatctaactctgacaccaatgtccaaagagatctcttctcacaagcatttggggcacaatagatagcaggctaatgcttgcacacagtatttgtaatcagctatggtgagatcagtctccaagaggtacttccatgtagaaaacaaacttatttagcaaaacaaagacacaattaaacactgctagttacaagtccttagccacctgatttttttgagatagagtcttgccatgcaggccagattagcaatgaactcactatgaaatccaaactggcctcctggctcagtttttcaagttctgaaattagaggcaggcaccatgccataatagcaagaaggaaagaataaaagcaagaagggagagaaagaagggagagaaggaaggaagaagagggagagtccttaaacttttccttactgaaaataatcatacaccaaacttatttcagaatattggagttagttgcaggctagacatcagaaagtatagttattgttactcactgactgcaacagaggcctctgtaatgtgaggtatgtgctctcaatattctaacccccagggtaagcatttaaaatgaatttccatccatcagtataaagatggataaatatagtgtggtctatggacacagggaatggtattcagccacaacaagagtggaatcatatcatttccagctgaatggtgggattcctcttaagtgaagtaaatcgacacagaccacaaacatggcacatcctctatgacatgtggaagccacacaggtgatgaagcagaaggggggccactgagactgtggtaggccaggaggagccttggggttggctgggtaacagatacagaagtgagtgctttgactgcagggaagacttgtgattgaggctggctaggtaacaggtacaggactgagtgccctttgactgcaagaacgaaagacttctaatgttctgagcaccactgtgcaaccattaaccataaacttcaagtagcctcttgaaaggatcttactgctctccatgcatagaagtcacaggcatgtggcaacaggaacatagcaagaactcttgtgagatcactgtacactgtgcccacgtgctagactgtcatgctaagtccctagtggtctgctcactgtgtgctgattcaaacagtttacaaacaccatgggcacatgattggcccttggaggataaggcctaccaatgcgctccatcattatggcatcagaacctgagaattatacaggttaggagacaccatcaatgctcttgaacaaagttacttcttaaatccactttacactgtaaatcccagtttcttgctctctaaagggaaggtaagctagtatcttaccactgactaaaagtcatcataggatgggggtgattccggagaaatgtccaaaatcaaccctagaggacattaattcaaaatcagaggctacagaatggatggtatgtggaagaggtgtgggagaggaagacatcgaggagaaggccaaagagcaggatatcagagaggagagagagggtgttagaaaggaggaagaagagagaggaggaaggagaaaatgagacgaggggaaggagaaaacacacaacagagactttgacctcaagtctggatggctccaacagaatacataacccagtgcaatgtgaaatattgtcattaagccttagggaattctgcaaccttcaaggtactgatccatgatttgctcagaccatgtgatctacaaaatagtgcaaaaagtaaaatatgagggtacattatttctgggtgatttttatcatgtgtatctaaagcagcagaaacttctaggagccatcagatgccaacgggctgcaactgtctctagaggcttaggactggggagacgcactctactcagataaaattaacaacagagggaaactcaacttctgattccagggatttgaatgaaaaaaatgcattcctagagttgccttgccgaagcccagcatccatataaccatgctcatgtctttatctatgtaaccatgctcatgtcttcatccatgcaaccatctcatgtcttcatccatataaacatgctcatgtcttcatccatgcaaacatgctcatgtctatacttgttaaaaaaaaacaaaaacctgttgcattgtaaaaatttaaggaaaggcaaaacttcactacaagaaaacaacctcaagcttattttctattaaaatttgtttttcttttttgctgttttggtttgctttgcttcaaaaaaatcttattgaaagaatattctcaccccaaggtgatgtttcaaattgtactttcttgataaaagtttgtggagaacagtaaggatgcaggcatgtggccttttcacactgatcacaagtgtggtttgtgttccataaagtagccgaaggctgggtttggggaagtgcctgctggagctgaaggagcaagcagacccagccaaagaaggcctctgatgtccatggaaacaacatttttcccttttgcttttgatcgagatgtttttattttctcatttgatatttttgtccttattttcaacccacaagccatgatcacaaagccttgtgacaagactgaattaaatgctgtatcagtctccaaaaacacaaacctggcttctttgatgttttcaattaaagaggagttttgctacagacttgtgggatggttttgatcctggtcactacttgttactgaaacagctaggcttcctttggcatacagcttgacaacatagatttaaagggtaacatgtttcctgatgaagacaaacacagttgccattttggggattttaacactgtaaacaccacagtcataagatttcatcaagataattagcacaaatctgcctctaggatggctatttactttcacatcagagcaacccatgagcctgtttctacacatagaaactactctgttgaattgcttcaagttcatagtaaagacctgacatcttgggatatgtttattacaatgaaaagaataaatgttttcagtgcccaaaagcacacatctcaacttaaacataatgcaaatacaaatatagatatgaattcatagtaaggtttagattttaaaatcagaatgaagaatataatcttattttctagataagggaggattcatttctgtacacagccaactttaagaacacagagacacactactgatttacccacagtacaaataatatcaccacatacttgcacaaaaaatggcctctatgaaaccacatttcaaaatttaaaagccccatctattagtgataatcttgccacagatttcctcagccactatttattcttcccaattttaaattaagaccatacacacccacagctgtgggtttgcagattgctttcaaactgtacttccaagctctattccagcccctgggttcatctaaagtctgctgaacttaagttcatcttcctctgctgaaccatgtcttgtcatttgtctcattgtctctggccacgtgtgccatcagcaattcatctttggtggccataagatctattatgtttggtttctttttttgttttttctgactgcttttcttttccatttttttaaatttgaattagaaacaagattgttctacacgtcaatcccagttccctctccctcccctgacacccccccaactaaaaccctacctatcacataactgctccccagagagggtgaggccttccatagggagtcatcggagtctgtcatatcctttgggatagggcctaggccgtctcccgtgtgtctaggctcagggagtatccctctatgtggattgggctcccaaagtccacaccgatgctaggggtaagtactgatctactacaggagaccccatggatatccgaggactcctcactgacacccacattcctggggtctggatcagccccatgctggtttcccagctatcagtctggggaccaaaagctcccagttgttcaggtcagctgtttctgtgggtttcaccagcctggtattgacccctttgctcatcactcctccttctctgaacctggattccagttcagtccagtgtttatctgtgggtgtctgcttctacttcgaccagctgctggatgagggatacaggatggtatataagtcagtcatcagtctcattatcaggggagggcatttaaggcagccttgcctctgttgcttagattgttagctggtgttatctttgtagatctccagacatttccctagtgcctgatttccctttaaacctataatgtccccctctattatggtatctcttaagttgctctcctctattcttccccagactcaaacttcctgttccccccatgtcctcctcaccctgcctcttcaacctcctagttctctcaggagatcttgtccctttccccttctcgggggaaccatgtatgtctctcttagggtcctccttgcttactagcttctctggcggtgtggattgtagactggcaatcctttgctttatgcctaaaatccatttatgagtgagtacataccatatttgtgtttttgtaactgggttaccttgctcagaatggtttcttctagttccatccatttgcctgagaatttaaagattccagtgtgtgtgtgtgtgtgtgtgtgtgtgtgtgtgtgtgtgtgtgtgtgtgtgtgtgtgtttctgctgagtaatactccattgtataaatgtaccacattttctctatgcattcttcagttgagagacttcttggatgcttccaggttctgcctattacaaataacactgctatgaatatcactgaacagatgtccttgttatatgaatgaatgtgcttcttttgagtatatgcctaagagtggaattgctggatcttgtggtagactgatagccattttcctgagtaaccgccatacttatttccaaagtggctgtacaagttgacactcccaccagcagtggaggagtgttcccctttctccacatcctctccagcacaaactgtcattggtgtctttgattttagccattctgaaaggagtaatatggtatctcagagttgttttgatttgcatttccctgatggctaaggatgttaaacacttatgtgtcttttagccaatttagattcctctattgagaattgtctatttagttctataccccactttttaattggattgttttgtgttttggagactagcttcttgagttctttgtatattttggtgatcatccctctgtcagatgtggggttggtgaatatctttccccagtctgtgggctgctgtttgccttgctgactgtgtcctctgccttacagaaacttctcagtttcaggaggtcccatttatgacttgtttccatattctcattatattctcattgtattctaggaaatgtttaatttcattttttatttcttccttgacccaggaatagtgtaatttggtattactcaatttccatgagtttgtaggttttttgcaatttgtgttgttgttgtatcctaactttaaagtacggtggtctgataagatacagggctttattttaattttttgtacctgttgaggtttgctatgttgccaagtatgtggtagattttagagaacattccatgaggcactgagaagaaagtatattcttttttgtatctgaatagaatgttctatagatgtgtgttaaacccatttgggtcataacttctattagttcctttgtgaagtttctgtctggtgttcctgtccagtggtgagagtggggtgttgaagaatcccactctaagtgtgtagagttttatgtgtgatttgagttttaataatgtttcttttatgaacatggatgcctttgtatttggggaatagatgtttagaattgagacttcattctgatgggatttctcctgtgataagtagaaagggacctccttcatctcttttgattgattttagtttacagtctaatttgttggatattaggattgctatctccacttgtttcttgggtccatttgtttggaaaatcttttcccaacatttatttcttaggtaccatctgtctttgaagttgaggtgtgtttcttgtatgcagcagaaggatggattctgtcttcttatccactgtgctattctgtgtctttttataggtgagttattgagggatattactgatcattgattgttcattcttgtttgttttggatttggtggtggtggtggtggaattgtgtgtggatttccaccccatttttcttttggctgttgatatagtgggattatctattgcctatctttttctggttgtaaattccttaggaagcagttttccttccagaactttctgtagagatgaattggtggatatgtattgtttgaatcttgttttgtcatggaatatcttgttttctccatctaattgattgaaagctctgctgggtatactagtctgggctggcatccctggttctcgtagtgtagttagaatatctatccaggaccttctagctttcagaggttccatggaaaagccaggtgtaattctgattggtttgcctttatatgttacttgacctttttcctttgtttctcttaatattctttctttattctgtatgtttggagttttgattattatgtggcaagaagaccttttttgtggtccactctatttgttgttctgtaggcttcttatacttaaattggcatgtctttctttaggttgggaaagttttcttctacaattttgttgaatatgttttctgcacttttggtgggtttctttaccttcttctataccaattattcttaggtttggtctttttaaggtatccaatatttcctggaaattttgtgttagggatttgttggacttaagattttttttggtcgatgagtctatttctcctagtgtatcttcaaatcctgagattctctcttccatctcttgtattctgttggttatgcttgcatctgtagttcctgatcatttatcagcttttctatttccagcattccctcagattgtgctttctttattgtctctattccagtttttaggtcttgaactgtttccttgagagatttgttgatttcttgtattttttggtttgttttttcttctatttctgtaagggattttctcttatcctcttttgaggccctctatcattttcatgaagatgtttttaaggtcattctcttctgctacatctgtgttgtgatgttcaggtcttgctggtatagggtccctagactctggtggtatcatattggttttctgttgttgagtgtgtttttatattgtcttcttcccatcctttcttcctgtgggtgtagaaggagtctcttcctctcttagtgggtacaggaccaagtttcccttctggtagatgcaaatagttctaatactctgatgtctctccttcttctcgtggatggaggcaggactggtactggggccttggaagactctaagtgtgtcgggttctgctgaaataggatcctgtgagcagtccccaggcctcaggtgtccccgagaaggtcagaggaagccaggtgtgttttctctatgtattttcttagattgtccagtattcagaaaagttgtgaaatccccaacatcagaaaactcttcatgtttactccttcaaatattacatcttattactttcactttcattatatgtgtatcttccacaagagtatatttgtttataggctcataatctcttcacataaaactatcttttaggtatatactgaacaaaggaagcttaccagtgatgtataaaggtagcaccatgtatcagagagaaaattaaatttctcatgtgattcactaaatatttttaaaatatgaaatgctcaaatgctagttaaaatggattaacttgctggtattacaaaaacttcaaatgtaaaatggaatacatttggagttaaacctcactgtgcacagagaggcggaagcagtactgggtacaagatggatagcatcagtgaggtgtaggttagtcatggtgactcatgcttttggatttcagtgtgctgaaggattttattccataaaataacaggaaatatccatttagcataatgagcattgtgaagtgtgatgttagcatcttttggcttattgaatggtaggaaagcttattaaataaaatgtttcatgctggctctgctatttgtaatgctaacaaaaatgcacactgatagtttgatcgtagttaattcataagatccaggattaatgttataaaagggtcacaaattagagccaaaaaataagagaatcattcatggtcactaataaattgctctaaagggcttggctcccctagcaggtaatgatgtcacaggatgatgaaggaatagctaagcagccagagtgccagttctggctgatgtcctggccattgcatcactcttggcctggactgtagatggtaaaggaaagggaaaatgcagtttgatgtaaggctcatctagtaacgccttacttaaaggtatattcaatcaacacttgaacccttaaaacatgtaagtactagatgagaccaggcatcgtggcaaaggtgtagagctacagtccctcggacgtgaaggcaggagcaagaagagtacaaaggttgtctcagtttataacaagcatgaggctacctgagaacttgtcttcaaagcacactaataaataaaaaggcaacagagaagaagagaactaggaggtagattatgttatgcaaccatgtcagcaaatatataaatatacaatataaaaatataaatacacccacaaaattccaaaattcctaggttatattgtgttttatgagttcaaccaacactttgggatggatcttctcaagctggtggcctgtccaagtgaattgcaaactccctattttgataaagatattgccacgagtagctagaaaatggtctcaagagggagtcagtagtgtgagattttaaaacctgtgtgacagaagaataaatactgacagcagttgaagctaatggactgggggtggagttggagccctgatgtcagaaaatgtaagagagtgtcagggcagagggatgtgttctctatgacaggctagtgatgacacatctaagcaaactcttccaactctagatatttaaagagtgtggtttgtggtatacaaatcatatattctaaaagaaattaaaacataatagcattggaagatattgctttgggtgcagatgaatataggtatacaaaatctctgcattacttgtcaaaaactctatgtggatatacagttaactccaaataaaagatttgtaaacacccccaaaatatgtgcattggcagtaatgactcttagcaaaataaaagtaatcattggaaaacacgatcctccttgccaggtatctgatgattaatgcaagttcaatgccatgcaatcctggcttctacttggaaatacttaattcagcttgagagctaatggccagtatctagtattttgaatttgttttgcctcggatcaatctttaagcaggctgaacacattaatcatgtgctgctttggtctttcttgggaagacacatcacaggacttctgaaaatgttctctattgatgaaatatgccattatttttatggtatatatcatacattaaagtcaaaaactgaaattggcaatataatgcaaaatgtatcagagttcctcagaaatattactaagggagcctccccgaggcctacattctagcaattacaaattataatggaaaaacagagaaaaaataaagtccagatttaattcatttcagggcaagcatagtctttagtattaagttgagtggatcttcattcttaatttccatttttatgaaaggttaaaacatacatttagctattggcagcaatagacagcaagctggactgtaccctgagtaataaatcttgtagtatgtcagtttatcaatctatcactatgttttacatagggctccatagctcgagaaactggatggttcccttctttgaagtcacaatgaaacaagatcataggtggtcacaaaacaaaatcaaggaattactttaagtggagtaattgctacccgtactcaaccagctgctatcacagaagactcatatagtagtgaatacttcctgatgaaataaaactgatgagaaatccatttgaaaagaatatcaaaactataaactgttcccactcttggactgtgatttgtctcttgatgaacaacagaaagacgtgtggacggtgtccttgcaagccaaactcctgaatttctgcttccccccttctctccacttcgtcccctttcacttctgctaaacatactttcccatagaaaagaaaattgccaagaactggcatgctctcaaggcttacattttcactgatttttccaaattgcaataattcagaaaagccatattgattgaggactaccctttgtggttagcctaacactgtgaattgaagacattcttcctaggccttctccaggcctttaaaaagagtgtggtgtcccacaggatggaaatggcttaaacatttttcaaagtagtacatgaaaagtttatggctggatgatttgaaagtatcatcgtagtttattggtatttccccttcaactgcatttggcaaacttatctaagcaaattgtataggtacatttttttatttaaaactaaatttgtgaattatcaatttggagaaaaagaaaaaccatacatgtctaattttcatgttttcccaagacactatctaaataagaagcattgattatattctcaacctaaatgataattaattcactggctctgagcccaatgggcaccaccttagtccaagtatgacaatcccatttgacttccaaaaccaaccatgaaccttgattcacttaaggcctgtttttaagaagaggcatgaaatcacacaagaatcataagatatcaaccccatcagtgcgagcaattagaaagaataaaacgagcagggcataagaagagaggagaatgaagggagggagactgcaacagaaagcgtcatcctacaccaggcaggaggagctaagcaatgccacattatgacaaagtgtgtgtctctatagcatgagaaagaatatgccaggctaaagcttagcttgtagataccaactagactcagttcaatgcaacctgctaagtccagccagagcagtttttaaactggtttgttaatggactaagaggaaaaagcaaaagaatttaaagaaatcactgattgtagtaagtgaaggaaatggtcttcagtcatgacaagatgacagtaggaagaaaaatgtcagaatgaataaaggtttaattataaatatagaaccagtaggcaaagagtgtgtgtgtgtgtgtgtgtgtgtgtgtgtgtgtgtgtgtgtgtgtgtgtgtgtatgtgtgtgtgatgtgcatatttctgttgatgactcaataaacagtaagttgatcaatctaattcaattaattttggaaacaatatttagagccatagaactaaacttattgaaaaataatcttcttgatgggcggtgatgttgcacacctttagtcccagcacttgggagatctctgggagttaaaggccagccttgtctacagagctagttccagaacagctaggcctacatcaagaaaccctgtcttgaaaaaccaaaaacaagtgaaacaaaacaaaacaaagaatctttattgcctgatttggtggcacatgcctataataccaagtaatcaagaggctgaataaagaccatgagttcaagtcctacctgggctgcaaagcaagtcatgatcagtcagagcactctataaagatcctatctcaaaataaacaatgacaaacaaatgaggtcaacaaaaaaaggcaaaggctcggagcatgaatcagtgagcaaacaattgtctagaatgaagaagcctctattttcatctccaccacatccccacagcactggagatgcgcattttagagcacattccagtcatggaggctgcatacactagtggtgcagttgagagcaacttagttaggattaagtctctcaaaggacagagaggcaccctgccaaaaccttgaaaggtgatttatttcaagacaagatgttcccaaatattgcaaaatatactgcacatatatacaaacacacacttccatagacacacacacacacacacacacacacacacacacacacacacacacgccgaaaaccaatgatgacatggtagtagcattctgtagacagatgaaaatgacccaaaccttggttttagttaagcatgttcacctcataatcaaatagtgcttttaatctctcaaattaacaaaatattttaagaatgcaatcttgtaaatatcattaataaaactgatttttgcatatgagttttctatagcaattgggtcatactaatgaacattaaattttcaaatattgtaaactgcaccacaactgcaccggtatcatttggattgcataaacacggtcttgcagagtagtgtactctggctcttcaatcagagggcctcaaagactcccataggcccagggaatgtctctctctgctagacttaaatcataaatttttgaacgagttgtccaggcccatgtgactttgcccacactcatgtttgttcgcgctcacatgtgatatgcacggaagccagaagactgtcttggatgttgttcctcgggatctggccacttcattttcaggcaggaactctctttgtattggagtatatgtctttgtcatccaatatactaagctaactggccagtgagccccagagatcccctcgtctctgcctccctaatattgggacaacaagtctgcactgctatgactggcttcccccatgaatgaatgctatggatgaaaggcaagtcctcacgcttgtgatacaggtgcctaacccccatcgcttctctctggtgctgggattgcaggtgtgcaccacaccttatgttaccagttctttcaagcaaatatgttttcagagcaagaaatcaaagctttcactgttctgtattggtctatcaggactatttaaatgttatttcagttaatatacaatgctgaaaaatcaacaaagagagagaaaggggtaaaaggccgagagtttcatttcagatgcagtttctctgagattagttttaaacacacaacttttaactttatcaatggctatatttctctacaataatattttaagaaaaactcatattttaagttcttatccgttaaaatgtattctgcagatggaccaaaattaactttctgttaacttatatttacccttcccatttccttttagatttcctggatgaagcaacacacctgaggccctgcggtgaagctctgcggagaacagaagcatctgtaaggatgtctggtcctgtcacaggcctcagcatgtccatggcataggcatctgtgaatgtgagcatcccatgcaactcagaagcaagtcactgtaaacacattcaagatcccgtagacatgcatacggcatacttgggaaaggcaaacccaactcattctgattgtgtagacccaacctcaatggcttgtaaaggtaattgtgaaggcgccttggaaagggaagtaagatggtgtacagtgactggctccagccatgtgggatttgtcacagtaaggcgtttgctctaaccattccaagtacactcaaaaagaaactgtggattaaaatgtttgcccatggtttcagagtaagatgaaaagtattgcttaatagtctttcttttgttattatattacataacaaataaatgttgatactttcagtattcttactttaggagatctctttaaatgttcaagatatataatttttctataacaatacatttcaagtgattatatatatatatatatatatatatatatatgccataccaaacagtatgctgcctagattgaaagctattttttccattgtgagtcacgttcttaactgtaatgataaacttatcagtaattaatgggataatacacttctcttctggtgacagtcaggtgaccttatggagctttaaactatgaacttgagaagaccaagtgtcttctcacacatctagcactatagctccaacccaatttttttctccttttttaatatagagaatattttaaaattatattctaaaacaaactaagtaaaatgtatgataaaatctgcctatgtcatatttagagtcttacactttttttcttacagtctgagggttaagcttacttaatcacaaaacacatttgagaatattgtgctttctgggtagattatcttctgaaaattcatcgactacaaggttatataaagtactagtaaggcatcaaaagaaatgtagaagaagtcattttagaatataaagcttagaatctggcctgctccaagagctcagggactacagttttcaatatgtacaacctacacctgatttaaaagaaaattcccagtgatgatcacactgcattcaaacctctggcgaccagtgctacctcccatggatggtgatctcatccagtgcgtagtatctgtgtctcaggtcagcagggcgctcagctggatagtactgcccgcggaagtgcagccttacttgagtggctttcatgaactcttgaagctgtgatctattgtagaagtcattgtacccaggacgctgcttttgtccaggcatcaggaggtcaaaggtgacattaccatgcgaaaatgaggtaaaactgtcagggaaagaaattttatattttaagaagctattcatggttttgatcaactagaaatcacaagtttgggttatttccatacagtatcaggaaactcccaaaattcttcagtcttgggaaacatacattctatttattccacatataagtaaagtgggatcatcacagagaggctgaccagaggtttcaggggaatgcaaatgcagatggatggctgaatgagatgagcaccatattagacagcaatagtggattgtaaaagtgaatacttctgtcctttataggaactgtaagaagtttaaaactcaactggggtggggggtggagagtaactcgacctctctaaaaccagtgatggaaagagatctcttctagcctagtcaggtgcctgacccacagctcaggacaaaggcaatggtttattaaaattaattgttttgaaaatgttcatactcaggcaagtgaaggcagttgacagaatcaggattttccaaatctccattgtctttcattccccaaatactgcagtttttagcaaaatattgccagtcctcccagggagagctgtctgccttcttcttctggatccttattgcttcaggctgtgggctggagaagtgaacgatgatgcgaaatacctgtggatggatatgtccattattattgaaatacctgtggatggatatgtccattactattgaaatacctggggatggatatgtccattactattgaaatacccggggatggatatgtccattactattgaaatacctggggatggatatgtccattactattgaaatacctggggatggatatgtccattactattgaaatacctggggatggatatgtccattactattgaaatacctggggatgaatatgtccattactattgaaatacctggggatggatatgtccattattattgaaatacctggagatggatatgtccattactactgaaatacctggggatggatatgatgtccattattattgaaatacctggggatgggtatgtccattattattgaaatacctgcggatgaatatgtccattattattgaaatacctgtggatggatatgtccattactattgaaatacctggggatggatatgatgtccattattattgaaatacctggggatggatatgtccattactattgccacgggtggttaggaagccgaaacactgagacttcagatttaaatataaagatttacttcctcagccgggcattggtggcgcacgcctttaatcccagcactcaggaggcagagacaggcagagctctgtgagttcgaggccagcctggtctccagagcgagtgccaggataggctccaaagctacacagagaaaccctgtctggaaaaaccaaaaaaaaaaaaaaaaagattcacttcctctaattattatgatggacaacttaagaaacatatagggacttcagacctacagtaaaggcaatacattctagaattacatgttttttccattctcaatgattttgtaaatcacattgaacccattgtgtttgttctaaagatgtgaacaaagaaaacaactaccaggaagtacatatgaataagcacctgaccaataaatatctgttatttttaaaagagggctcaaatatttcataaattccattttaatatcaatccctaagcataaaacatcagatgtcagttttagctattgtgatttcattcattacaactctagtttttgccatggagtggatgaattatacatccaagtcagtatgttcaagaggtaactacaggtgcttgtgaaaataaccttcttggaaatagtcattacagctctgataaagctaaggatcttaaaacgagattattccatttaaagagaaggagagggggagactaacactctctgagaaacatggaagggggctctgcagaaacaggcaggaccggaagttacaggttcatgaattaacagacatcaccaggagctgaaagaggcgagcaaggctcttgcctgccagccttcctctagagggagagcttccccgtcaacaccattactgcacatttagggtcttcaggactgtgagacaacattgctttttctcaaggacatgaagtccctagaacatgcattcccaccccactgtctctgattacctggtattgttcattttccaagtctacggaaacaatcactccttgactgagctgagtcaggtttgcaaacacatgggaaacccaggaagtagcaatgtcaccatcattgatgaaggagagaggatgggcttcaggattcagccgtgacacttgatggtggtgcttgtcttctgggccattgggaatgcagtactgctgagccaagggatggacacgggggtggctgcctgggcagcgacaatgtggctggatgtgcaagggaggcagatctccagaaaagagctccagaatctctctgcaatggtccagagaagagggtaagcacacacaacctctcaggaacaactcctaagagttgattaccctcctggtgtttggaggactggccatttagctttaataatttttaatggaatattaaatgaaactcattttggacaaataaatatactcagtatcctcaagttctgtgatggtgagaaggttgattatcaacttcacagaatctggaatcacctgggagggaaggctccaggcatacctgtgaaggattgtctggattaacagtatcccccgagaatgtctgtgtgggattgtctagattacatcaactgatgtaatcagttattatgggaagacccataataacttcggtcaggatgatgccctttgcagatatcctggattatatgaaatagagaaaacacaatctcggttcttgcaagcaagcatccctccctgcctgcctctccactgtggatgtgatgtggacagtggttctgtccgctttcactttcccacgtgatggatgttaccctgagctacgagcacacacacacacacctgttaggttacctctgtcagatcattttgtcatggcaacatgaaagacactaagacaaatgtccttcaaaaatggtatggtttttaactcttaaaaaattatggggtgtgtgtgtgtgtgtgtgtgtgtgtgtgtgtgtgtgtgtgtgtgtgtgtgtgtgtgtgtgtcagagagagggggggagtaggaatgtgaaagtcaatttacaactttcaggatcaatcttctccttccattgagggtactggagactgaactccgatcctcagaacgtgcacttttgctatcttagccatctcaatgaccataaagagctacaacaagaatggctagctaagcctagcggcatgtgcctataattccagcttttctggatgtcatgaagaattccaatttaagacctgctcaatctataaagagttcaaggatagcctgggcaacttactctagctcttgtctctagataaaaagtaaaaagacggttggaggcatgtgagccataagctcttgcctcttgtctgtgaggtcctgtgttcaattcctagaaccagatgggaagaacagaggaacagaagaggaggcagcatgtgtaagcccttgctttttatcaaggtattttactttaatttaatatctctgtgcttatgtgtgttgcagaaaggagtcgtatatctagattttaaacttacttacactgtgagtgaacagcaatatattgaaaataatgagatttaagatgacatctccagttcatccaggggaaagcataagaaagcatgtatcattttataggcttctcatttgggtgaagggattgaggccaaggccatttgtcaatggcttcctgtgactcatctatgagagtctggcttcctgaaatgtttcaatggcttcagactgtacaccagctgccaacagtcagatgagaatgccaggggcaggcagagctattcaatttttccattaagaagaatatgcttgctatggtgcttcccaggtcactctcttcccacccccccccatcaccatcttccagacagccaacaccaataacccacatctgactagagaaaacaggcttcctttctgaccccagtgaagtgatggaggtggctagagttttctttcactaagggacatgaagtaactactcgaaatctcactgatgatttccaattgacatcagctattgaatgtgttccaaagtcaataactggtatggcatcttttctctggctgggaaaaacttcattccaaagaacatctgtgacatcactcttcagcatagtcagcacaggcaaaggagatgggaaggacagtgggcaaggggcatctcaattccttcctgttccatgatctggcatctttgtcctagcatcccctgatcccttggactgagaaacaaggagggttaagttgatcgtgggtctaccacaggctacaggctcattcatttaagatgtttctgaaatatctgagagctactcctgacacacaaagattcaacagactaatctatatctcccttggaaagatataaaaagtttcccttgaaaacagtaaataaggatcagggaaatgtctcagcagctaggaactcttgcagcaataacctgatgtctgagttcagatggccagatctcatgagaaggtcagacttagtattggtagtgcacatctgtgatcccagcactcacactcagatagaagacagaaggattcctagaagccataggccaaccagcctgggctatgctgaactatgactgaaaaaagagccctgtctccaaacgaggtagcagtcaataatggacacctaaggctgtccactgacctctgtatgcaaatccccacataccagcacacacacacacacacacacacacacacacacacacacacacacacacgtatgcatgcatacacatgcacacacacacacacacacatgcacacacaccacaaaactaaatacttaagtaaataagaactcatccatacaaacacattgtcttgggtaaggttactattgctgagataaaacactacaaccaatgcaacttggaaagaaaaggattattcaggttacccttccacaccaccgttcatcactgaaggaagtcaggataagaacacaaacaaggaagagacctggaggtaggagctgactcagaggccatggatggatgctgccatggcttgcttagtctgctttcttatagaacccaggaccacctgtgttgtgggttaccctgttcagacaccccttgcgggagggggtgagaagatacagcaccaagactcagaccagggcagttagtgagtagcagagcacactgcagactcaattattcaggaagttaggcctgcctctataccccttcccaaggtcctattggctcaggcagctgattctgctgcatttcccttttatcattggtgtttctgggtcaggtgtctctccttcagtagtctctgggcattgaggaaggcttggatcagggaggaagtgcctgttcgtgttcacactagtcggggtactgggggcagccgcttggctaggctggcagcagtttctcctacacacctgctcagggacgacaccacccacaatggcccaggctgtccattgaggacaatcaatcactaattaagcaaatgtcctacaggtctgcctacagccagatcttaaggaataatttcctcaattgagggtccctcctctccagggactagcttctggaaaggtgacagaaaacaagccagaatgaccgaccccttgtcaacctgacacacaaaaccatcactactaagccaaaacttttcctttcttagtaatcctcaagatctcacattaaaaacataagtaactataaaagtcccactattttacagatgtaaatgcacttaaattcagcctgtttaaaatatccattttctttaaaaatccaaaatcttctttcaaagtttaaaatttttcaactgtggactcccataaaaattgaaattacattaaaaactttcatacttcaagaaggaagatcctgggcatagtcataatctgaataaagcagaaaccaactccaacagtataaacaactcaatgtccaatatatcggattcactcgtcatctctgggctcctccaaaacatttgagctaattctatggctcttccctccgtagcacatgcagctggtctcctaggctcagactggatccactccatacctgctattgcccatggatgactggcacctccagaatgttgggatctcttgctacaactggtctacactttcaccaatagcctctctagggctctcttcaggaactccaaccctcccacacaatgtcaagcctcagctctgcttcatgacctcttccagccttcatatacatcactacctgcgtgactcttttactaccaagttatgctgcaaaaaaaaaaaaaaaaagaaagaaagaaaagaaaaagagaatctgtatttgtcaaggttctctacatgaacagaccccttatagaatgaataacctctgtgtgtgtgtgtgtgtgtgtgtgtgtgtgtatgtgtgtgtgtgtgtgtgtgtgtgagagagagagagagagagagagagagagagagagagagagagagaaagagaaagagagagagagagaaatctgtggtccagctagttcaacaatggctgtctaccaatggaaggttcaagaatcccataattgtttagttgttcagtccgcaaggctggatgtctcatctgatcttcagtatattccagaatcccaaagaaatctgctctaagaccagtgaaggaatgaacttgctactgagaggaagagtaagcagacaaagagagaataagttttctccatctgtagccttatctaggcttccaggagaaggtgtggcccagattgaaggtcaatcttcccatcttaataccccagggttaaaggtctagcttctcatctcaaagacaagaattagaagtggaacttccctcttcaaatgatttaattaggaaaaaaatgtccctcaaagttgtgcccagacatttgggttttagcaaattccagatgcagccaagctagtgaccaagaatggccatcacacgcacactatttccagtagattctaagttgggattcttcagagggcatctccaggggaaactcatgggcacaagataggaaccaatttgcctgtagaaaaccctaagataggtttttgttctactctccaaatgagggaatgctttgtgagttcttgtcatagaaaaaaaatgcacaattcttaagatatttgatcattctaaagtccttgtcccttggagctttcttgtgtatcagagtaatcagttgtcttattgtttcactttctctaacactaatgatttctaaaagcaattctgaaaggcacacatatcagtttttaagtattagcatctaccttatatagaatttttgaacaaacgcattaacatctatactgtgttaataaaatgaattttctgagagataattatctgtgaataattttgatcaccccacaatataaggagtttcctacagaacaaaatattagtgaatgagtataaattatgacaaagtaaatatggccaaatacaaattaggtaatgtttgccaattgctataaagatgaaaaatattacagtctccacagtactttaagtgaattggccttatcctcccatattcaagtgttagaataccacatccacttacctgtttgtaagtgacatgttatacaatcgaaaatcttgcattcttccaatgaactgttctgtacctgaaacatatgagtagataagaaaccccagaacacaagccaagcatgaaaagcatttagccgaaattcttttcaaaaccacgaaactctaaactacactcctatcatgtgtgttttctaattctacatgattaatagtaatcatatttatctccacagatatagggagactatgaagtcaaagtgagtcctttagcagattccttcgacacaattcatagctgtgattccctgaattcctctctcatttacaaatgtataaatctattatttcatcatccttaaactttgtcatctactttcaataacaactttcagaatatttgctctgccagtggaaaaatttcctgttctcatatcctacccactctagcttaaactccagaatgttgaatctaatgaacacaaatgctcaaccagaaagcctcaaaacaaaaacaacgcagatggatgtaagatctgttgctcatggatattgagtctcccacatattacagcagagtgaaagttcagtctggaaatatcattgtcccctgagaattattctaagctaatcaggttcaaggaccacaatgctatcacagattattttcatccttacataagtatcaaccttcacagacacagtattatttgtttaataccaaacatttgtgaggtatcacaagatacaggtaatcacaagatatttggaactacaaggaagggaaagaaaagaaaatggacgggacaacagctcaggtcaaagggcctgccgtgtttgatcctcagaaaccatgttaaaagttcatgcagtggcatgagctataattccaatgctccttctaggggccagctagcctggaatatgcttagcagcagaaacaggggagaactgctcatcacggtggaaggtaaaaacaaactcagaaaagttgtcctttacctctacatactgctccttggcatgtacatattcatggctacatcagaagcacgcatgcgcacacacacacaagcacgcacacaccagaaaataaaaaagaaaacaaaaaagcataacaaacaaaatacattcgtagtttgaatctgaaaagtcccctacagattcacattttgagtaactggtccccagccactggtgctaatttggagcatgtggacctttactgggtcgagcccagctgaagaagtaggcatgatgaatgggcctttgcaaatttacctggctccattctttgctggctctctgcttcctggtccacagtgatgtggacagcttcctccacacaccccagcaccacgggctgaactgttctttatgccctccccatcatgaatgactgaaacaaagaaactctgatacacagtaaattctttctctgcctggcgcgtggtaacaacaacacaaaaaacagtgaatacaactaccacctctgaatctttgttctgtatttaataaacaggaaaacttcaagctggtgttcagatcatgaagaccccagaatgagatgggatctaatacacagcattaattcagtaactgagtgttggaaaaattaaattctagcctggcagtggtggcacaggcctttaaccctagcacttgggaggcagaggcaggcgaatctctgagttccaggccagcctggtctatacagagagttccaggacagactccaaaactacacagagaaaccctgtcatgagtaaccaaaaaaataaataaataaaataaaataaaataaaattctaaccactgactaatttagaaaatgccatttttccaaaagttcattttccaacaatgtcttcatgacaataattttcaagaaagtttttttctatctttttttaattgctattattccttggaagatatttggagaaagctggtcagacaaaagttgttagatgaataaaagatggacaatagaggttagaggaaaggcccagaagtgtaactatgtttccagaatatccaggtacaattcccagtgtccacacggcagctcacaaccacccttaaaactctagttccagggaatttgatgcccttttctggcctctttggagaccaggaatgctcatggatcacagatatacatgtagacaaaacaaccatacaaataacttaattgtagacaacagaattagcatccagaatgaacccttgaatctacccaagaaaatcaagagcagttcagagaagatcacaagatcaggggtgttctgagagaagcatgaaaatcacaagggtctatgcttgagcatatgtatgtatatttaagcacacacatttgtgttgttttaagagggagatcgcttcttgctcagtatgtgcaaggcctggggttcaatccccaaaaccatcagagataaaaataaacaaatgacattgtcttcagtggttgtatctgaatgatgcatatttgaaaatggttaaggataatttatatgtgaatatttattcatgaagatcagatcagtattttcaattgataaaccgagataaacatttttaagttgcttttggccatgatatttatcacagcaacagaaaagtaaactataacagaatattatgaggaagaatgtttcagatttagaggtaaaagttaaatgggagggatgcatggggatgcctctaagtcatatgtgcttatgtgattttgtttgggagaagtgagccgaggatgtcacatgccactgtattaattttccttgagaggaaagaggttacactgcctgtctaaaacaaatgaagctggatttatctcctatctgtcctttttcctataagctcccacccacagctcttctttggacatcctccatacctcatactacagtcccaaagattcaattttgaatactcttcaactctttaatactcaatcctaagactttatacttgatattgcctttatttcaagaatcccttcctcacccagttcttgtctcagctttgaaatatgtcccttggaaaataaccagaggccaccccagtgccacaaagttcctcaacacttttatgtgttcctttcatttggttacaggtacctacttactcctctatctgtactatgaaataaaatgcattgaataaacatccccagcaggataaagtattagttgctcttattcactgggctatccacaactcacagctgtattcctgtcagctggtaaattatttgataatattcaataatgaagggaattaaagggatgcagggagtgagatgagtctgtagttaacaaggaagttctctccatgggaataggagagaaggatgactggaaattatagcttcctcatcatgaattttcatggtcactctgtactggcacagttatgcaagatgggcaattaaacaaatatttgcatatcccaatatctacaagtgtcaagtgattggtgatatctagcactgatagttttcaaacagaaatttcaagggaaatatgaggtcaagggtcctgcacaaagagggggagagatcagtacatgtgggtagggccacaggaagtaaatcaaagaacaaatgataagccaggagaacaaaaaacatcaaagagttcactgtgtcctgggagccaatggactgtatggtggagatgaaaaacacaagacatttgaaataatgatctaatttactgaagtcttttctacaggcacataaaatttccccaatattcttttggacagtttgctgactgatgttgccacagttcagctctcatatacaaagcctgattgccaaccaggaaaggcttggttctgggcacaattgtgtccccacaaagatgtaactcctcacgtttgagaatgccacctttcttgcacacagtgcccttgcagatggaatcaagtgaggcagtcaataaagaaggcccatgctgagagacaaggatgtcatttataagatgagggaacagtccagacacacaggaccaaaagcacatgaggaaaacacaaacgatgcagtggaagccataaacaaacacaatggaaagagaagggagcctttggtcctggttttcaagttgaacagagtcctgcgtcaacctgacattgttctagtagggtccagaactcaaagaaaacaaatttctattgtataagccaccccacattgttaattcagccaccatgttctccatgtgattcaacatctttgtgtacaatgttcatgtaagcatttggagggaaatgttttgtataaagcaaccagaccagaacaaacagccaaggtggtaggttgaatgaaaaacgtcccccataggctcatatatttcaatatttggtcccaagtttgtgatactatttgaggacataatggaacatttagggggtggagcttgctagaggaagtatgtcattggggctgggcctgaatccatgtcctgttcttactctttgcttcctgtttgcagctgagatatgatctcccagtttctcattccttccactggaagccaacctcccagccagggactctcatccctctgaaggcacaagccaaaataatcagttgcttatgaattagttgtgatcaggttgttttgatcacagcaacagatacagtgagtaacctttcttagcactggaaaggtgtgctgtcactgaaatacagccccaattacagacacttggatcttgtccgagtcttcactgtggtttttgaatgtcaggttgactgcattcactttcatctgattttactcatctacaaatatttagtaggaatctattgtgtacccgtcacttttgctacagccaaagatgcaccaatcaaccaaagattacaccccggtcaaaatacatacttgcttttatggaacttggattaaaataaatacatacatatatgtatttacctaaatgtattgtacataaatgcagaaagtgctgttgataacagaaagtttagagcaggaatgagaatagggctaagtattatttgggtggtatgttgaagaggagacctcattaaggatgccgcaccagtggggagggaagaagattggtctggacatctagtagtggtatgttccaggagggaaaccaaggggggaatggcacctgaagcatgtgcttagcatgcttagcatgtcagaagaactacaaggagccagatcatgtctcagagtcagggagggagaggcattcagaaggttgagtagactagcaactggctggcaagctagagctacaaattgttaggagctttacagcatggtgtggggaatctgggttttattctgaatgaaatgggaggcctctggagggttgggagtagatgaatgacagcatcatgggttcattcaaaagtgtggagatttagaactcaggggaacatgttcaggagcagtgaggccagagggagctaccgcagtcatccaagaggaacaagatggtagtcagagagggtgttaggagtggaggctttcccagcaaggctgataaattagaatccacttcctatatcttaataatagttaaaggcaagctctgctgcagagggacaatgaaatccattttatcatctataaaataaaagggctgggttttataacctttaaaaatcatttgagttttacactttggagtctgtgataggacagtcatctccactgcctcagaattcatagtagggcattttgtgaaagaattagaaaaagttttgcaaaggcccaatgtgaacatgcattagccatcccaagcagaggagttacgactgcaagaggggaggtcacacagaatttcaaggacacaggctccggaacagactttaataatccctctgctggttgccaatttttaacagatatttgtaggagaaaacatgccatacagagctctctctgaaaaacatccatatgggaaagataggtccaaattatataaatggatcaagggcaggacatgactcacacaagaaagacctcagagctgttcagtgaggaaatgaagacagaatgaagatctgtcttgtgagtgagaagttggggcaaataatcacaccggtcagggtgaaagcagcctcagggctgaggagccggctcggtgggcacattgatggagggtctaacccacctaacaactctgtatgtggctacaagtacctggaacccagcactgcaaggggaagagacaggggcttgctgactgtgagcctagttcaaggttcagggagagaccctgccttaaggggggaatggtagagcagaatgtctgatgtcctccttgggcctctgcatgtaaatagcttgcaacccccacacaagcacgcagaagcaaatgctcacatacccacacacgaagatgtttgctttgaataataagcacagaacaccaatcttaaaagagacaatatttcttagatagaatagtttcctattttgaaaaatcccatggaacattcacgtgagctactaaaactagtatataaagttagcataccagctcaatacataaaggtttggtttttaaagatccacccatgccatttggaaatgtttagtctgtttataatgacaaataaaacatgagatagtatttatcagtctagcatgacagtgactatgagtaaaacagcaagatgtggataaaaaataccaagatgtcatctggtgtggcaaaatgtggtcatttgaataagaatacctccataggttcatatatttgaatgcttgatcaccatggagtggcactgcttgagagtgactgggaggtgcggtcttgttggagaatgtgtgtcactgtggggtaggctttgaggtttcaaaagcccaagctagtcctagtccatagtcagtcgagtctctctctctctctctctctctctctctctctctctctctctctctctctctctctcctgttgctgcctacagatccatatatagaactctcagctacctctccagcaccatgtctgcctgtgtgctgccatgacagtaatagactaaacctctgaacctataagccagctctgacgacatgctttcccttataagagtttccatggtcggggtgtctcttcacagcaatacaacgctgactagaatgcaaagtaactggaaattctctctgcccccaaagcagtgcttagactgtgcttccaatggctgccaagccagtgctttcagaatttggaaaataaactggattttgagtggcatttggaggctatgtttttaagtggatgaatatttgtaaaaacattaagttctgtcaaaatgtgaccttctctacattcattcttttcactgaaacttacagccttgtaggcaggagcaataaaatgtctacaacctaaattaaaaccagccgctagggagccaccggaaggatcagatgggattggaaccttccgaagctttctcagaaaactgccataatttaatgagcctgaagagtccctgttctttgagatctgggtggacactttgttctcctaataggaggagcccttttgagaggctgttggttgaaaacagtgagtagcaactgcttaagattgcagtgccccaggcagctttaatggtgagaaaaccagaaccatatgaataatctagagaacacagtgctcacagggagccttgaaatctgatacttgttgaggggtctttgacatatcctaagtctgatagttgaacaaaagaaaagactcaaattatgaaagtcagaaatggaaggtgaggtattactcccaacaccacagacgtgaaactgtaaagcctataggcaaatctatgactgaaaccaaaggctccttataaaagaaacaagttactagaaagatgtaagaattactctcaagtcaacgaggagagagaatacaagtaggtgcaggaggaaagggacaagagtaaaattaaaattctcacaaagaaaaccctgggactcaagccttccttgaaaaaatctatgaacactgtaatttatttcaaacaatttaagggaaacactctccaaatccattttgtgaggccagtgtggccctattgcccaaaccagaaaagatatcacaagggaattacaggctctggagaactgaagatgtccccaaaagattctaatgtgctatatttgtctgatacgctgaatatacagcatgagaaactgtggacattttttaatgattaaaagttggttcagtatataaaaaccaagtcatacatgaaattgatccaacaatgggtagaagtgtcatgatctaatccctagaatcatttcccgtaacatatctctaaataaaagaaaaaaaaaagaacagtgccagaaaaaaatactgtttaaaaagcactggaacattaaggctttaagtcatgtgtagataagcaaaacatatcaaagcacaccaaagaagacctaaatgggggatatggggatggctcagaggttaagaggatgggctggtttcacagggagcccaggtctgatcccagcattcatggtgggtgtctcccaacagcctgtaactgcagatccaggagatccaaatccttcttccacaagcactccactcacacgcacacgcacacacgcgcgcacacacacacacacacacacacacacacccacacacacacacacccccacacacacacacccacacacaaacacatacatacatacatacacacacacacacacacacacacacacacccacacacaaacacatacatacatacatacacacacacacacacacacatacatacacacacaccccacacacacaaacacacccacacacaaacacatacatacatacacacacacaaacacaaacacacacacacatacatacacacacacacacacacaaacacacacacacacatacatacacacacacacacatacatacacacacacacacacacatacacacacacacacaaacacacacatacacacaaacacacacacacacacaaacacatacatacacacacacacacacacaaacacatacatacacacacacaaacacacacacatacacacacacacaaacacacacatacacacaaacacacacacacacacaaacacatacatacacacacacacacacacacacaaacacatacatacacacacacacacacatacacacacacacacaaacacatacatacacacacacacacacacacacacacaaacacatacatacacacacacacacacagagggggatagagaaaaataaaaaataaatcttttttaagaatgagatccaaatagaatcatgtcccatggtcagatatgtagatatttcagataatagcaatataagtccttcatatacttatataattgtaattaaattctaatgaaattcccattagataattgtcatgagaggggaccctgaagtgcatttggggaaacaacgtttaacagttactgtttgaagactgggaagaaggagcagaacaagaacacgctctgagacatcgacacacaatcaaatgcacgcaccactttttgacaagtagttgattaatttgacctctgaagcaaacaggaagcacacagtcataaaactaaagtggcagatcaaggtgactttacaatcaggaagaaactcatggatagtcaacaaaaatcaaagggacaaatatgtaccaataaaatcacctaaaattcaatctcttcatcacacacagcacagaaatcaacttcatgaaaaacaaaccaataggagatatgcattatgccaggataagaaagagtctctaaaacaagatacaaataaatgaaggggcagctggctcagggagagccaagatggcagagtggaggcagccaggactctccaggcaggaaagagcttcttagctatgagtgggaaactgctgtaattgactgagatgtgctcagaaccagaggcactgctgctagaaaaggaggcaagaaaaatgctttagtcaagaatggggggtagcttagcccctcaagagaagggagagaagtgaagatgcagtctgtgtaactgaggaaaatcagacctcaaggctgcacagcatgctagcatgtgaaagagttctgtgttcctcaaacaaaaggcgtgagtgtggtgccatgatggggagccatcttggaaggtcgtatgaaagcttcttgctttgggaagcctgagttcctgttcccatatttccttttccctgaaagtcaggtccctgtatcctctcattgtcctgataactaggcccctagcagttaggagaggcacctgagggaagctcactgaaaacaagcccaggagctgtgaagatggctcactcacaaagcacttacctcacaaatgtgagggccacagtttgactcccatgacaataaaaacactaagcatggaaactggctgtggtggcacaggcctttaatcccagcacttaggaggcagaggagggtggatctctatgagttcaaggccagcctagtctacagagtgagttccaggacagccagagctatacagcggaaacctgtctggaaaaaacaaaaacaaacaaaacaacaacacaaacaaacaaaggaacaaatcagtaggtatggtgctgtgctgaggagagaaagagaggtagatctcttgggtttggtagtcagggagcacaacccaatccacacactagccccaggtccctatctcaaaactacagttcacggcagttgatgaattacaactaaggttgattcctcctacctagacactcatacatacaggcatacatgcatggcttcacacatttgcacatgggtgagcatgaacgagtgcccccccacacacacacctgaaggaaaagaaaaatatgtcaaatatagaactatatacgacacagtttgaataggagactgtgttaaggtttttgtttttcagttttcagcaatgctttgaaaatttgatatgaggtattttgatcatactcatatactcactctctctctctctctctctctctctcacacacacacacacacacacacacacacacacagagagagagagagagagagagagagagagagagagagcaagagagagagagagatctgtccctccctaactcacccaagcactccagttcatcaatcttatcttcaagcccaaaacctgatctaagtcttcttactcagggcttgttagatgtttcctgactcaacttcaatgattcctgtggttttcttcagactccctctcaccattgatcttgttcattactctattttctttctttcttccctttcttttttcaagaccaggtctgtttgtatagcattgtagaccaggctggcttccacctgtgtttgcttcctgagtactgggaataaaggcgtgtgccaccactgcctggcttcattactctattttcttagttctatttggttgtttatcctgttttcttggaattcaccagtctttataaaagttatcctttagaattccttttctagcattccgtcctgtcatagtcactttctgttgttgtatctctctgtctccatctctctctgtctctctcccctttatgcattttccatccctctctccctctctcacctctctcccccatcccccctctctccctctctcccccccctctctctctccccctctctctcattttcccttactcttctctttttggctcacatgtaccatgcagctgagaactccctgactccaggacagtgcccgacctcttcacagtgctcctgagaggtggatttggggtcaacccccaatctgtctgactctaagactcacacctcatgatcaattatttgggaaatcatatttagtgcttacatgcctcactgtcacccaaagttttaaaatactttaaaaatgtatgtcaccagcacagttaagcaatgtgagcattggtcacttaaattctcctcattgttagcattttgaattcactttggcaaatgactgtctagatttttaaacatttgtgctttggactagaggttgttccacacactcctgcttctcccgagggacagaacacacagctcttgcacgaggactcacaggatgtgtctgtctcctcgcaatgccgctcacctgtccactctaggacgggctgtgttgtttacctaacttccttctgaacgctagagctattccaactctgcttcttgaactctacagtgaacattttcaagaacagattcaggccattgtctaattaaattctcaatgtccctaaaacagtatttttttgattatgtaatccacagtttaacttgtggtagtttgtcagtttacccaaccctttcccacaatagtataatttcgttttttttcttcatactttgccaaacaataaaatgataaacagtgaataaattttaaattcccagctaactagacagatatttcacttctttcatgtttgttgacatacaaacatgccagtggatctcaaattacaagattataaaatatttgcctttacttactctactagctcacaattaacatctttgccactgagtcttaattagtagttctaatacaacatggctctgagtcatactccatatctcatattatgttacagactatttgctctgcaagttcaaagttcaaagttagacaactctcatgcaacaaactgcagtcaattttttatttcacttgggcctcctacatgtctatattgttttctttttgtgcatgtgaatacatgcatgcttgtttgttcatgtaagggcagtcatctagatgctaagggatggccccagtgtcattcctcaatctcagaccatctttggccttttgtttgttttaggtctctctctgacctaaagtttgccaatagacaagggcaatcctgtctccctgtgtctcttaccatctctggagttaaaaatgcacatgcacgctgtgctgcttggacctctttaatttgaactctggatatcagccgggttatctggcttgcacagtgcacagtttatcagctgagctgtctcatgttcctaggtatcatgtcttttcccacaccattaacctgtcattgttcactcatgaattcatatacttttccttttattttctgttcatgtaattcttaaagctttctgagtatcagcataaacatggaactaaaggaaagggcattttctagcctagctgaggttaacaagcataaaactatgaaaaagttaggttgcattctatctagaatccagaacactcaaatgagttcagaagcagccaacgcagtggatacagaagtgaaagcaactggggttagctttgggccatcagtcttttcttccctgccagtcacttttatagaaagtcaaccaatggtcattgatacatcagtacctgataatcttctgaaaaaagaattgcccacttaaatgcatagtgatatagtcctcatatcaataggaaactaagaatctgtttataaatcacttctgaaacagctctgaatagttgtgattcgaatggctctgtaattttcaatcaaatatttagagaaacattatgattgaagacaccaacaccaatcactcctcataagtacatttgctactctaattctctaagggtatagacctgcttgaaacgtggaacaaaatctataatggaaagaaaatgtccttagaaagaaacagacatcgattgacatgtgtggtggtttgaataaaaatgtccccagagtttacagcatttgaatacttggcctctagttggtggcactatgtggggaggcttagggggcatgtccttgtttagaggaagtgtgtcactgggggcaggacttgagagtttaaagactagcaccaatatgagcttgttctgtttcatgcttgcagttcagatgggagccctcaccttcctgctcctgctaccaagccttcctttactttgccataatggactcaaattctctagaactataagcataaataatctctctcccatagattgccttggtcgtggtggcttatcctagcaagagagaagtaacttgtatgataaggatggcctatggtgtctattttcatatttcaaaggcagcctgatcaaatcaggttaccacattaatatacacggtgccaagtccaatgaaaagcattcttttatagattaattttctaaatgtgtctctggaacaactgatgacaaataaagatatgactccagaatgttgaggtcagtcaatactcacacgaaaagtcattaccagccaggacacagagtaccaaaaagacactttctgacacaccataggccctgcttgatgccctatgggcccccaattgacatggtatagaccccactggacattctatagactacaatggacacattatagaccacaaagggcacattatagaccccactggaaatgctatagaccccactggacatggtataggccacactggacatgctatagacttcactggacaggcctgtgtctgaggcagtccacagcaaacaaagacagtcagtctggtgctgtgtgacaggtgacagcacctccaatttagctggaggagatatcttatacagctgccccctcagaacaaagccatctaggatatggacacaactaacatggacagtgaccatttttttttattaaaaaatggtacaaggaagagaaataaaatgatttttagaaagtccataggaacactctgtacctatctcatttctgattagagaggtggcaggcagcccggctcattaggcagaagtaatgagccagtctccacgccatctctaattagagaagagatacagtagacaccgccatacctgtaggctgatggagtaaggctagaaactaaaagcatccttcccctctcccagctcctaaatacccataatatgagtgtaaaatgtaataaaaatagatgtttgtgtgagaaagtattttccctttcttgtgttatactcataggtgaaaagtccttttcatggtgtctaaaaataaacatcattttcagattaaaatggcttttgaagcatcaattcagcatttagttcactgaagtagaacagagtcaagtcattttagccccacagtgcaaagtagacaaatttatagtgctaacaacactcttagaaatacttattgcaaggaaagatgtttacaaaggctagtgagggttaaatacctaaataaggttcacaagattaaaatgtgttattaaaacttttgatttgtagaagaccaaacttattcaatatgctaattatcaaaaccaagtttctaaaaacacaaactaccgaatttaatttttcatttttttagcttgatatacgagagcataaacaaactaaagtgatactctttttatatatatgcatacaatgtatcatagtcatttccactgttcagcccctccctttagccctcctcttctccacacaacacatcttacatctccctcctaacttcatagggaaaccaggtgctttctggattagatttgagcctgccacaggaaggaattcatacctggtcttaaaagacccatggctcaggaagccatagttctgtttgacagagaacctactgatgttgtcttgctaacccatcttgttgcctaagttccttgtcaatgtatctgtttctatcatagattggggctgctttcaatcttggttagagaaccttccagaaagtagtggttaatgcagagactcctaacttctccaaaggttaagaatgagctattatgagagctcactgatagaccatctgttatcggcacttactccccaagtgcttacagaatatcttggaagagaaggcagagagtatggaagaagcaggcggtctgggtggggtggggtactgtgaaagccaactccagactctccagggctactacatacatgagctcagagattgtggtcacccacagaaaacgtctgaaagatcaatggatgttcacatttccagtggacaagagagagcttcatgatgccccactcatatctgaggactcaatggcagttgatgctgataagggctgggagagtcacatttctttgggtggagggagaccactggtaggtttctcatactcctgtggatgaactccttcacgtacagtcagcactaattagatttactatgttattttttaaagtaaagtgatagatttttattgatcttttttattctctataataatcattctggcccaactcattgttccacaggaagaaaatgcatattcaaaatgctaataacagaaattaatggatatgtcagggaccgatcagggaagatttctctgcctcataccatagcccatgcaagtctcaaatttagttggatgggctcttcctacctcaatgctgggattatgacctgacctgccacactcaactctggttgtcacttatcactccttcaatatataataagcaatatattctaaatgcatataatctcatagagttccttgaagggccttatatatcatccattaaacacaaataataaattaaagaccagaaactgaacaagactaaatatttttgatcaaaggaatacaactgttttggactcattcttgtttgttgaacacaaaaacctcagaaatttagtcattatttttaaagtgtttagaatcagaccacaaaagaatatgaaaactttaaaaagcaaaaatagtgtagtggtggtggtgacctgtgtataaacaagggaggcagagaataaatgggaactctatgtgtttggcttgggttttctatagaccaaagtttttctttttaaaatgccaactaaaaataaatcctaataaacatgggtgtaaagtcatgtggggaggggtggggaggtgtaagccatgtgtgtgtgcgtataagccatgactgtggaagtcatgtgtgtgtgtgtgtgtgtgtgtgtgtgtgtgtgtgtgtgtgtgtgtgtgtgtgtttggtgtgtccttcctagctctaagtcttcagattgagtatgaaatctgaataaacacaggacccaggaaagcacagaggtgtagcaagtctttctctgtcccgaaagccagctcccaaataatgacagagacttattctcaactatgaaagcttggcctatagctaagacttgttcctaactagctcttataacttaaattaacccatttctattnnnnnnnnnnnnnnnnnnnnnnnnnnngtgtggggggctgtaattctcatgtgtgtaggtgtaagtcacacatgtgtgggtgcctgcagagggcagaggaggctgtatgatctcctggagctgtagacacaggtggttgtgagtcacctattttgggtgctgagatcaaacccacatcctctggaagagcagtaagcactcataagtgtgaaccctatctctacccccaaactcaatgattttcattccagtgaagtgaaagcaaaaactgaaaggcaactgttaatgttcaaatgaatggcaatacaatcataaaagaaaaagaaagttgggaaacttacccaaagagacataaaaattcaagccataataactgagactacacattttgtcccaggtgtacgtgggtcgtgggaacaaatgacagaatccagaagtcaatctattttaacacatgcagatttttgctaataatgacggtgctatcgtacagtggtagagatgatcaaatggctaaaaagaattttactttaattgcttatgtggcacaagatgaagcttggccactctatttcattgaatccatatacctatcctagatagaacacagacccaagttaaagatgtaaaataatgaagctttcagaataagatgtaggagaatacaatcttgataccatcaaagtatgttaagatacattaataaaacccaaacatatcaagtatgaagcagggatctgtcaattagattttactaaaatggggtggtgttgtttgtcaaagatcaccattgaagataatgaaactatatgctgtatcttggcagatacatatatccagcaaacacccacattcaacatagcaaggaatttctacaaattaataaaaaaggacaaatcatctaatcaaaaactggcctccaaaatccattgtgagtatgtacttcataggaaagcatatttacatggcaaacaggtacacaaaaagctctcagtgtcattaatcatcagaaaacacaccacaggccatttggcagtatccaggcaatggtgttggtaagggtacatgtgtgtcacaatattcggtgttactaattgtaatattctcttggcccagctattttagaagtgttttctcaaggtatcaatgctactacatacatacagctaaatatgacagggacagtttgagtgacaggaaattatgagcactcacagcatatctgcataatttattaggaacagacaactggcatcaatagtggcaggagtctctcctggactattctgtacaggcatccatacagagcacaaaaccatagcgttattttgccaagggaggatctttgtgacaatggaaatatcctatctacattttcacaggagagctacacaggtgcatacagttattaaaactcactaagtggggctggatgacagagtcatttagagtgcttcttgggctcttccagaggacctgagttcaagtcccatattctactgcctacctattctaacccaataactccaccttcaatgcatctgacaccttcttttggcctctgtgagcacttgcacacaagtgcacatacccactcgacacacatatttgaaataataataatgaatcttcaaacaaacacatcatcaaggtatacccctaatacttatattctatcttgtatgcatattttgacatgaataaaaatattcaaagaatagttccatgcttaaaacaagttagctggctttctaaaattgtggagaaaacattcagcataatattcttggacatattaataaatttcacaaataaataggagtcacatggtataagtatggattcagaacataaataaggaacctacaaattgaaaacaatgaaggtgtgtatgaaaagccagtcaacctcagcaacggctgactcactttataccaacacccaagagtgcttttaacttagaatccttaggagtaggaaacacaggcacacagacacacacacacacacacactcactcacacacacacacacacacacacacgcacacacacacacagacacacacacacaatgcacacacacacacacacatgcacacaagcgcacatgcacaggtgttcatggcaacactacctttgaagtaaggttgtaaattttcacaactttctgttatgcattagaacaaactttatgctatgcattaaaatgtaaaacagccatatacttcaacccagcttttcaactcccatggatttatctgaagaaataattgtagtaaccttaacaatagctttatttcctgacacaattcagtatatgctacacatggtgctttgaactgcaattgctcatttgacaattaagtactagtaccaggtatctactacatcaggatacttgagaatcagcaatactaatactgaatattacattgcctcattgaaccttataatggcactataagacatcatcattatcatcatcttaaagttggtgtggccttgaggtattagtagctctacctgctcagtaagtggtgagatccaatttgcctctaggcagattagcaccagagtacaggaactatatgatcagataattattaaaatatatgcatgtgtatataatatatgtatatgaattcatacatacataccagaggaaaatctggatgttgatatacgtacttacatattattttccttcaaacagcttcttgatattttggaaacattagaaattatacaaaaatttattacaggaccttgtttaagaagtgtgttacagctacacaatggcatgtgacatagctgaagaagcacggggaaatgggaaaaggtattgacacaaatgtggctcttaaacattggcaggggaaggagctatttagagaggatttcatgaaagcatatgtgttacaatttccttttggggaaaacttgtatttgtaaccataaacatcactgtatggatttttaaaaaaatctaagagtatgaaaagttcaattatgtctcagaggagatgtaaatgtataacatactttgtagtttacagaattctctgtcacttgggttttctaataataagcatgaactccataattctccagtgtaaagttcaagtgttttgaaggcaatgatgttgggtatttcaaaacaatttttattttgatttctactattctcagtttatagtgtgagccatcttttaatccctgtgttccaataaatgtgggaaagagaaatctcacagacctgaaatagtgcatgttgctggtatgcctcagtttgctggtatgcctcagtttctagaaaatatgttacagctctcatgtaataacaccctcattaaaactcagtgagtcaaaaacatatatatatatatatatatatatatatatatatatttcttttattgtatatttgtatggggctgggtgtgggtttatattacgtatgcttgtatgtcaatgtcaaagggtgatgcctgttgcttcctcacttactttttggggcagggtctctcaagatcttggagcccattgagtcagccagactggctggccattaggctgtacttgcctgttattctgggttgggaattcagactcaggataccatacatagatttttttttttttttacatgtgggtgttgggtatccaaagctcaggttccattactgtgtggtaggtgggtgacttactgactgtgctatacagtcagatctcgtttttccaaaagatcagaatagagatttttctgtcttaaagtttccctcaatatatgtgttcatgtggagtctgcaactgtggccttcttgggagaaagattgctgtgggtggaatgaaggctcttgaggtggaacttaaccctgaaggagacgggacttaagtctgatgacaactagacttataaggaaataaaggaaaactacacagaggagaccaggtaaaggcaaagtgaaactgtgcaagcagggactggtaggctcggcagctgtaagcaggacaggggtttggagagcttccccctctagaaggagccatggtactgagtctctcatccagacagctggcatcaaagaatgtaagattaaattctcattcccctaaacgaccaggcactggtggaaacttactacagcatccctgggaaacgaattcatctaaatatattattaagacatctttgctttttaaaaccaggacttgcaattgcccagaactaaatagaattttaaagacaaacatcttaccatttgaactgtatcctatttgtatagtgctggaggcagagtctgtaattgaaccacttagagtccttgtatcgaatgcagtaccattctcatccaaaccatccacgaagaagctgatttctgtctgatgcacctgtaagaattatcagtatcatcaagtgcatgaaatcttacttggtaccaacagcatgccagcagcctttctgtctttctttgaagttactttactctttctcaactcatgtggaaatagtggaagtaatttattttaatagcaaagcaatacctctgcatttacagatccagatatgaatctatacatacagtgaaattttcatgctgtaatgatgtattccagggtagtcatgggaccacactatgcatatccagtgagcaccccagtatatgttttaaatgctaatgtcattgtggccacacttgaaaataaattattacataaggggaaagatattcaaacccagatacacccaagatgtaaatgtgagtattactcaagtttctattgcaaagtgcttgccattaatactcatttctttaggtactggagtccagttgataatttttaaatatattttccctcagtaaaatgacatcaaaatttgtcagtcatatcctaaactggtcaaacagtctaacacctttctacatcacaggagaaacaagttctccaatacatactcggagaatactgcaagttaaataatttggtgtggtggcaaaatagtcctttaagtgccatcagccttaatgcagcactagcaaagtacacactgaagggtgccagttaaacaatcacaaagccaggtgaccagccagatatgccccactcattacaatttgatgacctctgggttacagtgtaagaaatggatgcactgtacaatgtagtacctgaatcaccaatcagtcaccatttgtagccaacacctcataggttgcagatacacacaatttttgatgattacccaccaattcagaatagacagttgtttagccaccaagtacagtgcctacaaatagtctttctgttgaagtgttcctggctgtaaaaggcattcaaactattagaccaaccaacatggaaagagaaaggcctgagagaagggataggctggaagagggagaagaagatgggcacttactactattcaatgaaaaggctggcgttaacacgttaagaaggggcgaccttgggaatgctgtcataggatggagtttgagagacaatgacgttagttaggatcactgtaggttcattgataaaacagattgatgcactgatctgggataggacttcaacagtcaagagtgcaatgtgcattttaacgtgtgagatgagagcacaaagataatgtctttaccaggctcacaggcatgggtctaaaactgtaagtcaatgtgtagatattatattatctatttatttattagtgttaaaaatgtcatatatgcatataatgtattttgatcaagcccacctcattccttccctaaaactccccctccccaaccagttttccctcccaaagtatttcaacaatatctctactaaaagggatttgcaacaatgaagaaaagataaaacctttacattattatgtgaattcttgccataggaatctttccccagagtcccccattcaaaaaccaagaatccaggggtcaatgctgcaactgcttggtaatatggattttcttcacacacaaaaaaagtagacaacattgctttcttccttctagccaacttctttaaatgtgttctttctgaaatagactggcccaggcttgcatgagactccgttttaaacaaagctgaaattcacctaaagttccttgtgagcctgtgtctatttctctctactgaataggagggacgcatctttttttattttccttgcatcccatttttctctgcctgctactattatttggtgtttgactgttatcatcatgaaagatacaggctcttccagtttcttatttgtagcattatctcatgttttacagcatctttgcacaacatgcaggctacatgaaatataactagcgaaaagttcccggtggtattaatgcataaaaaagaacgtggttccatctctactgtctttacccagcccaaaaactgatgaacagccaattttcctttatcacattagcacagccatgagggaaacacatttgttctcgtcagttacactaaagatactattaccaatctaacatatacatgttttatatcagcagtattctcagggcttgagagagtcaacaatatattaacaggagcatgacagtttatttaagaaaagaaaattgtctctgcagagggacagaagttagaaatgtatggctgaagcctagtgccacagctctaataaaggtgataattcttgtgctttctttatagcaggtagcactcctgtgacagctctgtcatatcattcaaataaaaatgttgtcttttacaagtttaagggtacctttattttgagccagataggaagcccgcttttgattttctgtattctatctgccctcggtgttcaggacctccatctctctctctctctctctctcttttttttatcaactcatcacgtatttgcttagtagaagaattcagtgtcagagtgaattccagaagatgtcttcacttgcctggcactttaaaaatgattcatgatgaccctaagctgatctccccacaccaacccctcccgaccaaccatctttctataaataagattaaatctttggtttttgaaccgtgttttatgttacaagattgtccaaactattttacaattctgatctggggcaccattgtgctggcgctgtgaagacaatagtggcctttttgtaatagctcatcccagttctccccattgccagttatcaaggggagtgagaatgcatatgatgggatttctgatttgtgaagagaaagcctacaaagaaaacctcctatagctctcattctctggcctgggtagatgagagtatgcacatgctagttgatgttcactgaatgagtaaattggcaaatccagcagcattttcagagggctttaaaccaaccccctggaggagtccacaagcacatgaaaataagtcagagtcactttcaagacttattccatgggagttccttattttattttaaccactcagctgctcaatggtgtgcccccatcagatactagactcacccatttgagtgaaagagagcatacaggaaaacaacaacaaatcctaggcactttcctcatgttctcaagcctgattagtaaagaatgtatttcaaatgacacaaaaggaaaggcacactggcattgctatgcacctgaaaccccagcattcgtaatggtaaggcagaaggattgccacaaggtgagggccagcctcactgactatgtggtataactcttaaaacccctataatacatttaagtttatatgcaaatgtacagtttaaatgattatttaatatctgagctaatgattaatagctacagattatttaccaaaaacacacaacactgcagttatgagaagccttcttttgagtcagttgttggccagattgtcaaagagactccaaaacattacaggctattatttctcttacccttggcttcctcctgtaagtggaagggaagtctttattactgaagacaccatgtactgtgacctgggacctagaggacccaggctgaatctgacctgagtatgtcctccctgggggctacttccatgttaccagaatggtccatgcaagcttccaaaggagggaaacagctaacaatatccacctatgactcttatgaaccacaaagatgaccagcatggtggaatcatcgtaagtgtgtagtagaggcacatataccctgccagcatccacaactctctgactggactcacaacaagagggacactgtgcctagtgctgaaaaactagtcaactccacagggctagtgaagtcatgagtcttggaggagaacctacaaccaccactttattacaccagcataaccctaacaacatcatctatttgtccttatccacactgccaagtgttgtcctcagtcactcctcaaggaaacttctctttgcagtagacatagaccattacagaaagccacaactaatcaatcatactgcagagttgtggagcacagtgtcaatggatacatctacagagcactcccacgtgtaaggcttccaagatgtctgtctgtgtggctggctggctggctggctggctggttcccgttagctctctgcccaccagccccacctacccctccacttactagctattggctgtttggcttatgattagaccaatcagacgccttaggtagcaaggtgaaacagcaacacatctttacatggttaaacaaatccatcataatcaaacacaatacatctttgcatagttaaacaaagattctgttccattaacactgaacatataaacataccaacatgcacataaacacatgtaaaaattaaaaaaataaaatcacacattagtgagcaattcctaaagggaaaatacagtaaatccatctggaatagaacagatagtcaagaaatgccatcgacacaccagtctttcaagaggctacgtgtgataacagaatacattaaacccattaattagatgatgtttgaatcactataaatgacaatagtttttaacttaaatacttagtttagtgaggtcaatggagcatagccttttgaaagaatctctgttggaaggtaccttagagggctcgtgtgtgagcatactgcatgtatgatgggggttttccttctgtatgtatgtttctcttattggttgatgaataaaacactgattgcccagtagccaggcaggacatataggtggggctaccagataaggaggattctggggagaggaaggcagagagaagcaccagggagaagctttgctgccgaaggagtaacatgcccgaatacggataagccatagcctcgcggcaattcatagtttattagaaatggattaataattaagagaaaactagccaatgagaagcctgagctcggccaaacagtttataattaatatatctctgtgtgtttatttggagttaaacggcagtgggaccaggcaggacagaaaacaccagctacacacgtatttgggctcttacttagaaagcctcccaagaaggctactttccttaactcaactggtctcctccaaaaattaaaccatcttaagaatttatgaaaaacaccttttaaaaagatttatttcgttgtatgagcataaatgttgcctttctgcatgcgtgtgcatcacttctaaccccttgaggtttgaacagagagtcagacccactgcaactgcagtcatagttgattgtgagccaccatctggatgctgggaacttcacgcaggccctctccaagtacagcaagtgctcataaccactgagtcatctctccagcactagaataacatcttttaaatagattcaacatgaagtgtttggcaacacagcctaaattcaaattcaccttcaaaagataatggattatacaaatacactgaaagccattttgagtgttaaggaattcaatcggaaagaaagccatcgtggcatgaaccagaattaaaaacaactcgatggaggaaaaaccagtctgaggctttctgaaatagaaactggcctaaaatagatacatctatctctaagtggaaaaaaaaaccacccagatttacataaaagattccacaatactgcctgtatctcttaagcacaagacaatttgtccccaaaaccccatgaagttattttaaaatatctcacgtatgttacatccccctttctgggagcacatggaatcccaccctaactgcttgccattttaaacctacgtgaactttttctaagtcattttattggatttttatctctaattttcctcatcagctaacctctagtttatggataaaggttgtcactggctcatgaacactgtggtgcctctgtgatgtgatcaagttctttccatatggatatttgcctgaatctttgagattattaaaaacacatacatcagatattacaccattgaaaatcctttgccaatgacttcagcattataaaagcaggtaatacagacgataccatttatttaaagtagtgtttacaactggcattgttctaaaactggaatgtgcattcattctttatatattttcagccatggtaaaaaaaaataaaaaattagtcacagagaagcaaaagtaacaataacaaaacccattcaaggtctcagaaatccgagtggtcccagacccagtccgaaacagtccattttaatctgtcacttaagtctagttagcattcagaagtaatgcccattgagctcactggacccatcaattgagtctatgttctagaactctacagagagaggactctgaccacagataagtcttctcatagagggtaatgcttctgcatgcatgtatagttccagttgccttgtgctgctttgagcagtcactaaccaatagctgacttgaaagtggttctgcctgaatatttactaagctcattgtgagctgataagtgtgatgtaccaagggagagatcaagccactgatggattcttcaggacattctcttcctgcggtggaaacaggcatgcagaaacacatccatgaaaggtcgtaaatgctgggtgggaaacatgaacagcatgtttagggccaaaggagagagatggggacctcattcttgagacctcctctgaaaacatttccctttccctgctgtcctcatagtaaacatatccctctatggtgttctctgctcttcctctcgctagtgtcgcttcgttggtgattcagcttaattagcagtctatctctcctgctactttataaaactacaatgtatgttcaaaattacaggaaaattgccaaaatgtgatttttttcctgatcaatttgaaattaaatatgtaacaaagtggcccatctctcccggatcctgtggcatgcacttgttacaataaaagcaaaatagaaccattgaaataagaaaaatggtagacacatctctagaatattatcttcaaagtctgttttcttgtgttgttttgttttgttggggccttgctagtttccctaaaatatcccttggaggatgtgatcccagtctgtaatcatagctgtgttctactactgtggtccagggctttctttgatcaggacaaattccttggcctttccatgaggttcgaagctgccacatcatgaaagttggttgcttctccattgagttcccacagtatacacataagtgtgtacatacatgtatgtggatgacactcttgccttcgtacaggttgaagggagcctcatttctgttggatcagtaactaatggaattgctcctcatttttgcactagtgaactaactcctagcttccctgctacaataaacaaaccttcagtgagtagatactcagaatatggaaacagtctcctcctcaaatacatcaggatgtaagtttactttcaccttcactaaattttgaatctgttcctaattgggtacaatacattaccctctgatttaagtcactgtcttattgctgtgaagagacaccatggccatggcaactcttgttttaataaagtagttaactgggagcttgcttacagcttcagagggtcaatccattatcattactgtaggtgcatagtgacaagcatggcgccagaacagtagctgaaagctacatcctgatccacaagccagtgtggggtggtggtgtgcagtgagggtaggaaacacacatttcctccaacaccaccacacctgctccaacaacctcctccttaccgttctaatccttctcagatggtgcactccctgatgataaagcattcaaatatacgagtccacaggagtcattgtttattcaaaccaccacattctcagtgcagcactggtggtgctgtagattgaactcagggccatatgcagagtagacaagcaacttagtacttacctattttgccagttcccttcctgctttatagtgtggaatagggtcacactaacctcacatcaaacttgccatctccctgtcttcaatacataatcccatgtccatgtgcattgatgcttggacagtagagtccctgaattgtgtatcatactggcattccccaattgattctaagtcatagcatcctaagacagttatacagatctgtttgctcttactttcccaccttagttctaaagtcagctatttctctaagaaactgcttccccctttagtgataaggggtatctagaaacaaatataagctgacactctaagtaaaagacaaaaaattagaaaggtgttcacaagccagctgacctgcctctgaagctcacccctaggttaggaaattcctgtgccattcaactacttttggggggtatttcttcaaatattcgtttagcaaagacttttctttggttttttgagacagggtttctctgtgtagctttggatcctatcctggcactacagaatctgacatttaatatgtttaataatctaaggcctctcatgaccgtgagacacatctgctcctggcagcaccaatctacttcagagatgatgacgggcatcaaagaaactccgtatggagtttacatactttatggcaaaaagctagtcatttgggcaaagatactgcctttgcttcaatttttgacagtatactgttcaagctggaccagcaggatacaaaaagaaaaagacgactgccaaattttgccaagacaatgtaggacagtccttcaaaattccctgcatctcaaaatggtatgtcagatatactaggcctgtgggtcaaagaaggatgccccaaagtcacagaagaacctagaatgactgtgcagacagccaaatgtccctgtggttaggtaacattttatccttgtgggggtctttgacagaattgaagactagatagtcttagttaaacttttccttacttatgatacaaagtaaattatttataaaactttagagtcataaagataagatagacaataaagtattttctctaaattttccaaatacaacaaattggatattgtatctgtaattcttacttgataactgttacatatagctttactatgctgaggttaaacacttcccttttaattacacaaaaaaggggaaatgttgtgaaataatccttcaaattgtgaaaatgtgttactctcattgttaataaaaagctgattgcctggtagccaggcatgaagtataggcaggacagccaaactaagaatgctgggagaaagaagggcagagtcagaggggtcgccaggagacacagagggagcaggacaggtaaaggcatgagtcacatggcaatatgtagattaataaaaatgggttaattccagttgagagagatacttagcaataagcctgagtaagtggctgagcatttataattaataataagcctctcttgtggttgtttgggaagtggctactgggatgggaaaacacagcctaaggaaatcttttatgtcctaaagtgggtgagacagttcatgtctcaagagtcttgtctcactcagtaatggagaggaaaatacatttaattcaccttaaacaatatacaataaaaaaacagaattcatcaaatggtaactcattaaaaatatatatatatatatatatatatatatatatatattatatcagctgtctatcgagaccagaagaccagaagagggtattccacctccatgaagctccaattacaggcaattatgagcaccctacttggatgcttggaattgaacttgcattctttagaagagtcacaaatactctcaaccactcattcaactctctagccccttaaagggccagcctaagttaaagacacatgagccctaaatacaaaaacagatgtgggccaaacacagaaatattcactctctcctatcttgtactctcaagtgagaaaaataaactatcatgccaccaatttgtacaaaataaataggtttattatcttatggaaaacttcatactgtaactggattgccaaatttgactggtattctagaatattttctatataaaatatataaaaattatataataaatatcatatataccatgtataacacacacacacacacacacacacacacacacacacacacacacacacatatatatatatatttagtccaagtcttcattttgtcacaagatacctttttcctggtaaacagcactgttggaagctatctggagactgatttggcataactgtgtgttaggacatttccaatgcccacaaaggctgacagatctcagaagtgtgagggccagataaaagttctcagtataaaaaaaaaaattcatctgttgattttcttcattataaggagaaaataatgagcttacaagtgttttgggtaattgtttaaaaaggaatcaaaaatgaagggaggtattagagggtgaaacaattcaaaggtgagggtgaattaccatggctacagtatcaaagagaaaaagaccagcatagttcccattgtctccccaggatgcttcaggctaagcatgtcttctaattcctccaacaatggatatttataaattagcattaacgtcctgcccacagaaatataattaggcttatgcagtagcttattaccttccacaaatacaccccagagttagactttacattgatttaatttttatgagtttttttccctcaaactatagagattaaaagatgtggggttaactgactatgttgtcatgcaattctcagcttaactactatcttcccagggtgccttgtgacatccacacagacctaaattatcacctattaactttttatcatactttcctattttggttttttttttaacatactgtttttctattttctgtttatttaggttttctcttgtctacttatcacctaacatgcgcgcgcgcgcgcgcgcgcgcgcacacacacacacacacacacacacacacacacacacacactcatgtgtacacaaccatttaaaaaataaggttgagttttattccttctcaattctcacagcatttttgatcaattgttataactggaaaaccctttcaccagaataaaagaaaatatgtgataatgtttaagaaatgactacagtttctgcttaagtattgcaacactcttgagatacttccaaaattgcccctttctgttacgctttctcaagattaggaaaggactacactgacacacaggaggacagcagcaaagaaaacctcagaaagcctatcaaccaggacttagtaatgagagaaaggctcaaaattctgccaagtctgtttaccatagtgtcacgaaacaaatataataccaacattctagaatataaagggtgaagaaacgtgtaagaatttctctctctctctctctctctctctctctctcctctctctccctctctctctccccatccttccctctctcacacacaatactctctctctgacacacacacaaacacacacacacacagacacacacacacacacacacaccagcatcaacagaaaaaagtagttaaccatgtctcatatttttcttcatggaaataagagtatatcaaaacctcagaaaagaagggaaacaaaaagaatgccctgactacaagacattatgcatatctactcattagaaatataatctccactatgcaagcattcaaaggtagatcaccacctacacctcactccagaaaatgacagcagtctctctctctctctgtctctctctgtctctctctctgtctctctctctctcattctctctctctctctctctctctctctctctctctctctctctcacacacacacacacacacacaatggttgatgctattttaagaaattacttaagtaaaccataaagaggatggacagtcagtgagggttgagtctactgcacggtcttgacttttaacatagaagttacaggggccagccagcaagatggtgaggcaagtgaagacccttaccttcaaaccccaaacccagaattacatttcatttcctagggacccttgtgatgcaaggagagaacttattcctgtaagtggccctctccacacactttctgtagcatctgccaccccaacctacaaaatgcatgtgcatctgcacacattaaatactaacaaaatattttatgatatttgacacaaaagcaattcaaatataacagtctatcattccatactggactaatccaatttatttcaaaaagcacaatactacagagatgagacagagaaagagagtgggcagggcatgggttacagtgaaatgtgtgataacttcctaattgcagtgtgtgagttaatagtatattgcatgaaatttgtgagttgagaattcagtcttaaattatttttacacatcaattttaaaaatacacatcagtatatcaggaccaattttagtatctttctaattatttgtaagaattacaaaatgaattatgtggctgaacagagggaagacaattccttctattaacaagaaccagaaggtcagacactgtaatgcactctttgggtaggattctgctggagtcaaacattttctgcaagctgaaggcagtctgtcaatatgtaccccaaacacagtatgcatactcttttagttaacagatgcctctctgaaatttaccctggcagtgctctgagaggagtgcgccatgtgaaaatcattaatttatagtgtccagcctgcacacctcatcactctttccagtgttctgaggtgtgtgcatgggaactcagaaggcagtgtgttctgagggtggatctcgaaagtcaaagggcacaagaagggaaaccaggaagaaaaccagggattattgaattcactgccaaccagagatcccaagacagcaaaagcctgaaggcccaaaatccgtctgcagccaacagctatttcaggagtggatatgtcttcagaaagacagcttggactttggctgaatgatttttaaaaatagaaaaatggggatgtatagtcattggctgtttgacaatttgatgaaggaaagattggggcatttgggccactgatttgcatcccatggtaaagcaggtcatcttggtagaagcagcatagaggttaggccaccggatttgcagataggagtggggacaggcattcctgtacaaataaatagcccctaagttacaacctgatggtcacctttctgccgttgcatttttcaacctggtcctggtagtaataacctgaagtggtgcaccaaaggctgtctctgtcaggccaggtgaaagagggtaggagtaagaacaaaatggatgtaatttccaaagaaacacttttcaaataccctaaagaaatgataggatgatggacaagttcagaaaccaagacataccttacagacaagccagcagtacgggacattagctgctcagctctctggatgggagaagaactcagaagctaatccccagatgtcagcctgaggaaggctgggccattctgccctcaggataagcccaacctctcatggcccttaaatctagtccaaggttttgatgagacagtgattccttggtttggccattggggtcaatggcatagagaaatcccaattttattattttgtctcactatatatggcatgtagggcagaggcttggcattgtcttccctttacttttccctacttactctagcttcatagcatactggttatactctaattattttaattaggtttaaaaactgtgtagctgtagaaatgcatacagtgtactttgatcactttagtctctcttatcctcttctccactcccgccaaccaccttattggcaactcttctcagtcccactctctcctctctattttatgtgcaggtctcacacaagaggacatgactgcagtgcccctgccatgcccatattcatcatccccattccctgctcttacattgtgtctgcctcctcttttacactgttcactgggcctcacagtaagtgctgcagatgctgcatttaggactgagcccctagcagtcctcactctcagaactttgaccagtgacgagcttctgctctgactgtgtcccgctgccaaacaggcttctctgattaaggctgagagtatcaggagtctatgtttagaagcatcaggatttagaaagcaggttgactacactgccatttgtaaaataccagtagtacatgtcctcacagggcctatggtatcctagctatagaccaggattattgtatcgggcaggtattccctttttcgagtggttctaaagtataatcaggaagtggttggttacccctaattctctaattctagtcacaattctcattgtaaacttggattaaagtagccagcaataactgtgccacagcagcaagtgtactgcctgtaaactcctgagtaattagtctatgacctgttaactcagtcatccagagttttatgatatgggcaaaaatggaaggaaactccttgccagaatgtaacatgaatcgcctcaagtcccggtcctgcacctggcctttccagtcggcttccctgctggaatcctggtcttttccgaagacctccatacacatatcataaatatcttccaaaggcttctgaatcccactgccagagggacacagtaacaatcccactgatttgttatcaatttccattgatgtgtattagcagtttttatcatcgctgtaacaaacatctcaacttataacaacttaagaaaagatactctttgtttgagatcagtggctttaatctgtcaagctgtgaagagaacaacagaacagctccctgtcctaacagccagaaagcagaaggagcagtacaggggtccagaagaaagacactgaccaggacatctcctaccagtgcctgcccccccccccacacacacacatgaggtgctacctcctagacacatcgtcacatgattacatttacaaatgatttaggcataacattgaccaaagttgatcacatacagaaatcttatggttgttcattgagtgctgctccctaggaagcatgctgagagtgtcctctgacctccacagattgaccaagatagaagaccagtgagcctcagtggtccatttgtctccaagtccccagcaccagggtttaagagatcaccactagcccaaacctggcttttcagacctcacatttgcaagacaaagaactttactggcagattcatctcctcaatcccaagatctttgttgttattcaaaagtgatttcctataagagaaatgactgaagaccaatattactgcagttagacaattttcttcagaggtagagtattttctaatttgtaggcatggaaactctggctataggaaacttttagtagaacatgtagtctccaggtggtccagagtgcttttcaaattaatgatataggcactcacaatatggaggcttcagtcagcaaacaagcaaaaagattaattaactattcaataccctttacaaatccttaaacattaaaatgtatttttatagctgtacttataacatgtgtcactgggtctttagggctctattccaccagagacagacataaaggacctgattttaacatttaacttgaggagagatttctacccttgtgatcccttcctcatccccttcattcatccccttgcttgtattaggtataaggattaactctggtacttcaggggaactcagatgtccagctgagtagcatcaggctcttctgaacttctaaccttctcttctgtccagacctcccgagactctggcctgtgacacacttaattcactttctcctgaacaacaatattagagaagaaagggagactacattctgccatgagccagttacttgactgtataaagtgaagacaaactttcacaggtgaatatagttacaactattattgtcttgaagaaaacaagactgtggcaaggcaataatactttttctgtaaactgaacttgagctaacgttctaccttcatgggttgtccctctaaagcagcggttctcaagttgcaactagtttggaatgaacaattctttcacaggggtcacatatcagacatcctgcatatcagatacttaggattcctaacagtagcaacaaaaataatattatgattgggggccactacaacatgaagaactgtgttaaagggtctcagcattaggaaggttgagaaccatggctctaaagccatgcttggaagtctttacctaaggagtttcctctttcctagaaacctatcaagcattctcagggatgcttcttgttgctataaacagccagactagcttgttttttgtttctctacacaagcgtgagatacagagttcagattcaagcagctgtgtaaaaacctgggcacggcccctgggagtttgtaatttcagcattgtgagaggtagagactggaggagcagaatttctgggttttgcagcctgccagtctaactcaatctgccatgcgataccaactgtcaaatgactaaggcagaggctgatagggaaggactcccaagcttctcctctggcctccacacttgaacacacttgcacacaaacatgtgtacaccacacatacgtacacacaagagtcacgactttgcaaatacaaaacacaagggaattccaaatgagtaagttcaacaggatgacttgctgtgtataggggccccttccggcacacccttagagatctgcaaaggaccctggtctcacacccaaatgctaatgctgtgtcaacagatgtagggtaggtttgaaagaatgtcataggaggctaagccagagcacacactagaggggatctactaagtgcgcatactcgctgaggttgtaccagggcaacttggttgcttgttctatgaggaattctggccttttgtcacttggcagattttccattgccttctcacaggcattcataagatggtttcaagtttatgaaaaccatactaaaaagacaaatcacagttaattaaatatatatatatatatatatatatatatatattatacagtgtgtgtgtgcatgtttagcatctgtacatcaaaagcagtggtcaatacagtataaaaacaattaaggtaccagaaagcacagccctaagaaagaaaagggtcttagatgaaaccatgcttgtatgtgtgtgtgcatgaatcccaagaattcccactatatatatatatatatatatatatatatatatatattatatagcatatatatatcaatgacattggtaccaaaactgtttataaaatgatgaaaaagcaagtatttgtacactatctccttgtcttttgcaattcagctgttacttacaatgcattgaaatagctcattgtatgtttccttttccttatgtatttgttatgtgttgacatgtgtgtatgtggaggctaagaattgatgttgggtgtctcttccttggtcagtacccaccttatttgttaagacaggctctcagtgaacctggggcacagtgagtccatgaaatgagacgagcagtggggtccagagacgctcctgtctccaactccccagaaatgggattacagttctatgccatcatgccaggcttttatatgcgtcctgggcatccaaactcgggtccccatatatatgtgacaagcattttaccaactgagccatttccagccgccaacatttttcaaaagaacaaattagctcttctatgattaaaatgtttgttggtcctggttggtccaacatacttctatcagtagaatacagctctctacatttaattacttacaaagcattcctgcaagggataaacttgctacacaagttttttctcattataataaaacaaattttaacttttaatcttgcatctcctatttcattaaagtaaattcttaatctcatattcattaactttttaaccttcctttctttcctctacttacataatagccattaatttctaaaagaaatttacatgttgaaaggatttacagcaaaggccacagaaagtaaacacacacagttagcctatttactttgctagagactccaaccatgcctcgtacagagaggatgatgtgtcaaacggacctctgtcctatctcagacactcacatgacacagtttccctgtgcttccagaaccactgcaaataatttctttggtaggatccaggcagcactccttctgacgctaggtagcagtggacaaaataataaggacttgcatggcttgcatttacctctcacttctcacctgtcaatgcatttagtttgctgtcagtaaaagagaaacaaaaatttaaaaactgtcagttttaaaagaataagacaaggaatgccaggaaatgcagaggaagtaattttgaaaaatctttttctctacttgagcttaagttcttctcctgtgtgaaatgtctaactccatcactggaattgtttgatgtcttaaatcgtaggttccagaatagattgaaatctgtgatcgaaacgtgtttgctttaaaatcatagcgttgaagccagggcaaggctgaggcaaatgctgctgccactcagccagtcaaataaagggattctggggatttgcagcattatttgtcgagaaaaggcgattaggctcagattatgagatctatgcatccctgaagtttcccggtcagccgctaaatgagtttaatgaaactgaaaagttgagacataatatcacaatgaatggattcacaatatcactgtacgcctttctcagcagaaacccaggaatctcaattatggcccaggttaatatttagaaatgatactgtttttacaatgtcttctaatgtactggggtatacactcaatacttcaaccaacatgttttagaatttaaatttaaattacagccatcttaactgacagagtggtcttagagtggataattctagatgtaagtatttaaacaacagtggctaagttaaatgattgacaaaaaggggaacgatgatataggaaataagtgagggtttattgcctcatattcataacaatgtatctaatttacaatttaagtttattagactgtggcaacttctcccctccacacagttgaacatttctctgctatacaaagtgacaattgtttgcccaatttcctgaaaactactctgtattcggtgtacttaatgaaattaaaactggagagcacacattgcatttcttacaatagtgaaaacgaatcattataccattccatcctgaggtagcgagtggactgaggagaacatcagctgagaatatatttaaatatgattcgcacatgcagtattagggaggcaggaaaaacaggatatgaaataaacattaggcatcaactcctagctcactgtcaagagcacggccaagctgctaaccacgaagttcaggggaaggtaactatctgtcaaatgtaatcggtgcgagtgaacatacttaagcttgtgctgtgaatccaccaagattgctttggtcttcttgacattcaattgcaaggagttgcagctcatccaggccaggagacagtttgacaaaaccaagagagctcccaatgatgcctggctttaaatatagatgcaactatcaccagaatccacagagacccaactttctgatcccctgtggtgtctgcacaaatcggccaggcaggagtcaactggtcatagaaggcccagaatttcctcctattgctctcacacctgccagcctgctcagttaacagaccatttttaatcttgaaaaaaaataatgagtatagatttgattgacaggtcaagtctactgggttaacctaaggcttctgttgcattatgcttaatcctgcctcttccctttgccttttcttttagcttccactagagacctgccccctagtgcatacatcttaataaataatagccaggcatgtggggagaaatccagagggtcaattttaaacactgccttgcagatcgcttctgacatgtatggaatttgcctaggcagagtctcaaccaacaagagaatcaaggtgagtgaagttaagtgactccttagctcagcttcccccggggaactgttacctcttcagcagactctgccagggcccttaggcttctgttcctgctcttaatcctccatggaagaaacttttcaaccattcctcttctgtctgtactgattttcaatcaaggaaactgtgttgagtaccatgttgcctgtgattgttcagcgttctcactcatccaatgcctcagtcaggcatcggttggtcacaggaagcagctgatctcatcacagggctctcattcctgccaggatgttctgttaacaaggcatcattaatccgaacaaacaaagaaagtagattgactgacaagccgggcctttctggattagtctaaggtttctgatacatactggccggtagtcttatctctgactccttcgaagattggctcataaaatgacatgaataagccttgattcaatgagaaaccaacagacacaaatgggcagatagcttgatcagtaatgctatgtaaatgccaccattttccaagagtttgtaagataaattgctcaattaaggaaaaatctataaacttccacatggggaaagaggatggtccagagtgtttccaatttctgaactctcattccagctgcttccttatctctcaatgggtctccactactccctcacctccaaacacaatactgcgtggacagtaagtctggggcactaagtgagagcatgtgtacatacgtaaacgatgtatgtgccaaggatgaactgtgtttagaactaggtaaaacatacatttacaaggtaaaggggaaattattagtattggagtaaatttacggaagggcatgatctgggcacatcttctctacttttattatttatatttctaagcatttgaaaagaactatgctcaaatatttatgaatttttaaaatgttcttttgttcaacaagtactttcccccaatctttcttatctcttatgtggacctcagagacaatgtcctggatccaccaaactcaaaaaaaaaaaaaaaaaaatccaccacctttcaaagtcctcaagctaaagtgcatcatgcaaaaagactggattcgtttgctaggaaatggccacggggttaatttcatcccctgactcatgcataaaatatcttggcccatcgtgacttccatgcaggagcttgcattaatctgctactgttgtgtccaaaatgactactgtgctggcaacttttctgtcaactctgacacaagctaaaatcgtcttggaagaagaaaactcactgaagaaatgtctccctgggcctgtaggcaagtctagctggtgttttcttaactaagtaggagggcccattccactgtgaggcccaggtgatttagggctgtattagaaacataggctgaggaagtgtccttcttggcctctgcttcagtttctgcccccccccctcccccttgaattcctgctctacttcctcagagaggggctgtgaccttgaagtgtgagatgaagccagtcctttcctccctggggtgtctttagttgtgtctatcaaggaaatagaaggaagactagagcagctctcaaacgagagtgagtctgccctggtaaatagttctttagcaatgagtcctgcctaccactgtcattcgcatctgtaccacgcagtaaacagctctttttcatctatccttgctagtcaaaaccagagcagttatggtgtaggctcgcttcagcttgtcttccccacccttcacaactgaacacctgagataaaatatgtatggcacctcccaagaactctgaactgaacttaccatgggcagaaagagaatacttccgaaaggacagggaaaacctttaaaacagaaaaccgctgctcactgcccaccaagaccacagtggtacacacggattaaactgagtgcaggagaggacgctgtacaagtcatatcatatctttttgttttccaaaccaaaaatgtcacagccattttggaaaagtgtttcccaaattctgatgaaatctaaacatgcagaaatgcatataactctagctatactttaatacatgtacttgaaatacacattagaaatttaatattgtgccctgccatcagcacgcaatcacaaacagccttagtgatttgtcttgaaattttcttctctctttaaaatttctctttcttgggtgctgtgaacaaaacccaagttcttgtgtgtgacatgcaagtgctccaccgctttgatccctgaaattcttacaagaattcacttttctgagccaggcattggtggctcatgcctttaatcccagcactcgggaggcagaggcgggtggatctctgtgagttcgaggccaccctgccagcctggtctccagagcaagtgccaggataggctccaaagctacacggaaaaaccctgtcttgaaaaaccaaaaaaaaaaaaaaaaaaaaaaaaagaagaaaaattcacttttctaaagttgtcagcataagaaactttttataatttatacacaaaaattatagctattttatggctactttgtggtgttccaatgcaggtacatattaagtgttacataggacagatgctgagaaacagggtttttttttctcactgaagactgaacccaagtgcccggaagacaactgcttcccagctgatacccacccagccccacacaatagatggcattccaaactccttttcatcttaaccttatcaacactaatattttattaaataatgtttcaaactgccctatagtcactgcctgcggtatcttggcccttactgatatttttatgtgagtatatagtgactttgagaataatatccaccaagtcacccttgcttcctaactctcaccccactcctcaccaatcccctttttttctttaggtagttttgcttctacttcatgtcttattacatatataattttacccatctttaaataaatgattcacaactgcacacaaatatttgtctttctgagactgacttcattcacttaatctgattgtctccacttgtatccatcctctttcaaatgatgtaacttcataccttttcatggcagaatcaaatttcagatacatacatctgtgtcacaattggtttatgtattcctctcttgatggatgcctactttggtgctataacctaactattgtgcacagtcccttaataaacgttgacatataaatatttctgtgatgtgttcacttggagtccctgagataaacggccagcaacaatacaactgagtcacatagcagagacattttcagttacttagagaacccacaatactgatttccacagcagctggactagcaattagagggttcccatgtgcccacagccatttctgtaacaactgcttttccaagtgagattcttctcagaagatttttgcctatgcttatgcctatgcctgtaactccaagtggcttacatatactttgtttatgagtgccagattttctggtctggcatccaggtctttcatccacttggagctgactttcatgcaggattaaagacatggcttcattcttctacaagtggatagccaccttccccaattttcccaacaagttgaaaagactcatttattttgttaccattgtattttttacatttttattgactctttgggaatttcacatcaggtctattattgttactattttaaatgggtatctccctatgtaacactggctatcctagaactctcgatgtaaacccgcagaccaggatggctatggatacagagagatctacatacttctgcctcccttctcctgggatttaagacatgtgccaggctgatgctgccttttatccgacacacatctttcattcctttgttaaaactcaggtgactgtcagtgtgggggtttttctcggagtttcctactgcattctactctatgttagagcagcaccatgttagagcagcatcatcatcatcttcctatggatctaaataccaggggtttggttcggttttgctttaatgcaggattgatttggctatctgagggccttttggtgtgtgtgtgtgtgtgtgtgtgtgtgtgtgtgtgtgtgtgtgtgtgcgtgcgcgcacacacacacacacacacttccatgggaattttaagactgcttgtatttctgtgaagatttggattttgatgggcatcccacaagacatggggatgcttttggtaatgtatccatttttacagtttaattcttctgatccattaacatgggtggtctttccatattttagtgtcttattgaaattttttccatatttaaaacttttattgtagtggtcacttgttttcctctttctttttctctttttgaaacagggtttctctgtagctttggagccggtcctggaacttgctctgtagaccaggctggactggaactcatagagatctgcctgcctctgcctctcaagtgttgggattaacagtgtgcactaccaaaacctggcaagatctgattttcatggttaggtttaccccaagtgtataactttgaggcaatagtgaatagaattgttttctatgttcttactgatctataagaaagctatgggttgaacacattaattttgtatctggtcagcttgttgggagtatacttatctgatttaaagatttttcagattagaatctttggagtcttgtgtgtagaatcataccacctaatgataccgacaccttctgttcttcctttcctgtatgtttttgatttccttttctctccctggctaaaatgaagtactatctgaataagtgcagggacaatgaacacccttgacttgttcctgattttaatgaacaggttttcagtttttcccatttagaataccataggctaaaggtctcccatatggaacatttattctgttgagaagtgttctatttctactgacaataaagcaatggtggattttgtcaaaagcatgaattgagaggagcatgtgccttctgttcctgagtccatctctgtgccaatttaaaaacactgacctatcctgacatcactgggatgaggccaacttcatcatggtaaacaatcgttattctgtgtttctaaattgggtctttagatttgtattgcagatttggcatccatgttcactcgtggtccagaactaccacttgattttgtaaagcctctccctgggatttcgtctactcaatggaatctagtactgtagaaatgttagtttgaaggaatcacactgcctttgatttttataaattcatatatttctacatgacatcttgcacatttttggtttattctgctaattgaattaattttaagctttattcttttttaatttaaattagaaacaagattgttttacatgtcaatcccagttccctctccctcccctcctcccctgccccccactaacacccccactaacacctatccaataccatttctgctccccagggagaatgaggccttccatagcggggtcttcagagtctgtcatatcctttgggatagggcctaggccctcctccatgtgtctagcctgagggagtatccctccatgtgaaatgggatcccaaagtccattcctatgctagggattagtactgatcaactacaataggccccatatatttccgaggcctcctcattgacacccacatttatggggtctggatcagtcccatgctggtttcccagtgatcagtctgggggccaagagctccctcctgttcaggtcagctgtttctgtgggtttcactagcgtggtctggacccctttgctcatcactcctcctcctctgcaactggattccagttcacttcagtgtttaggttgggtatccataagctgtattcttagtttggagcattttcaatattcaagtagagcttagtcttagtagctttcgaatgataaaccctcaaactatgagtttacactaacaattgtgtccccctacattactccaagagtaggatattaatttaagaagcatccatgacgaccggatcggactgctgcagaaatattctaacagctaaccacagcagcccctttaactcaaatagctattgagagataaaggaacaaaagaagtgtggtgaagtaagttactaagattgatggataagagaagatgactgagattagatttggaccagcagaaaatagaggtggaaaggagaagctgggatactgttggactatgcagaataaaacaattactaaagctctgatgggttacagtttaaaagatatgagaaagagacaggggtactgaggagggaggaagaggaaagtgtgtgggttgtggttagacaggacggcagagtacacaatgaatggatgcagaaacaaacacacccatcacaatgcctaatcgagcaatgcagaaactaaagcaagatcattaggacagctgtatgcatgacttaaaatagcaaaagacaagtgaggtctaagtgtgctaggttataagaatagcattgcactggtggccgttatttccctgatggggatcgtctgaattgtttgccgcctctgcttgtttctggaagcaaaccgtgccgaccagacaggtacagctgaagctctagttcacacctataaaacctgacttgctctgtgcagtaatcccactggagtctgcatgagcaaaaatttggattgagattccggagccacggcaccgagttaagcagtttcaacctgttttttcatggtttactgagagaatgggccctctagggatctcatgttaactccttggtttttctgtccacagcttgtccttggctgtgcctatatagctcagctactgactgcatggcaccagttggagcagagggatttatctcccactgacctcaagtggcagccacaggaaggttttcttcatcactgtagctccagctctatagcttgcacttacccctggtccctctgcccaccgatatatctgggtcttcctgcctctgatgcttttctctctccagctgttggagacaagctggtgttgtatggaaagagaaggtggaaactcctcagccagaagtagtgtgctctgctggactctgcttctgcctcatccattccagactgctaccaacaataaccatgtccatccagcccttggtgatccggctaactctccttgcagcagtggggtggggtggaagctgtacttcctggcacatcccagctgacatcactcagagcttcatggtgtgaatgacttaccacaacacctctagcctgcttccctgtggagacctcaccaagcttagttctctgtttccacctattgtcttctcatgccaatagaccattgtttactactctggctgttctttcaaagacttggagtttcaaatcctccatcttactaggaagctggaaagattaatctagtatttagagtcttactggtaaccctatcaaaagcatggctcaattctttttatttgtttttgcctcaattttctttattttgtcatttataacctgaaatattaggcttttcatttacaagaatgatatcaaactatatgcttccaatgcattaaccatgaaaagtaataaaaaaaatgataggacacaagagccacagccaccagcatttttttttttctcaagcaaggacgcttttgttacttaaagatattaggtaatgtgcatttatcaacaaagtaggtggcagcagacagaagtcagtgtataggaaccccccctcaataaaaagcaaggtattaggtcaatgtcagaaatgttgatattgataaattctgatccaacataatctttatattcaagaacagtcccctgattcacaaatcccactttatgtggttttagttacccagatacataacaataacctgagtattttaagggaaattctagaaataattgaggcacaagtgtcaaattgatggctgttacaaataatatgacaacaatcccatgccctctccctctaccccacctaagattatagccttccttttgtccagcacttatagtatgtcccagatccatttctgttagccacttggcagccatcatggttgtcaaaacagctatcaccacataagtatttgcattcaaatcaccatcattttccaaataacaactctgaaaggccagagtagggatgctggcaaatgcattacagttgtgttatagtaattctatttcaatgctacctttgctagccatttactttacctgatttacaaagcaaacctcactagagtaggcatgcatgtattttcaggaataaacatactgcgtgtctgcccccttgcttctagacaatactgtgggtctcagaaactagcatcagtagataaaggggggttatgtgccaataaaaacctaaacccaaacaaaatccaaactcaggtctagacacttcatttactctgtttcatctctagcacaatcacataggcatgccagtcaagctgacatgttctcagtattgaggtactacagcagcattttctctcttcattatagaaaagcacatggtaggactagccaaagaagtaaacctaacatttataatggatgtcaacagcatatataatgacttaaagaaacagctattcaaaaatttgtctaagaggaggataattcaaagacttcccggatagagagagaattctggttatcactgtctgaagcctggctaagtaagtaatacatttttatttatagtaatcctaaatttctgtggttaatctcaggttatatttgaaatgttatctgaagtactattgagttaaggtagtcctattgagttaaagcctgcaaaacttggcaatgattgggccagcaagatatcccctgtggtacagtagtgacacttttatcttgtgacaaatatctgtataactggacttatggctagttcagtgggagggaattcatacctagtactgtaaattgagccactttccatggctataatggtcacagaccctagaggagaactgactaccaccatttcctctactaatataatctgagtgcattataaatacttatccttatactcactgataagagcagttctcatccctcttcaaagaatattatttttgtgacagatgtagatagacttacaaaactcacaactcgtgaaaatatataaaatcagtgaccgtgggatgcctaatcccagtaaatatatatacaaactaattcttacagaaagtctcaagaaaaactgttgaagaaggtgtagaatgattctaaaagccagagaacctggatgtctgaggctaaatagcatcctaaaaaatgcatatatgaactttcaataatccagtgccagcataatgacacccagttgacaggaaattctagaaagtcccacttctagatgaagagctataggctgcaactgagcagttagaaagggagaatctctttcctttagaggaactctcacaaaggttgtccaatgccaagtactcagcccgggacacacgtatataagagaaacactgactggactctgtaggttatacaaagatgcatatacacacaaatacatacgcataaccataatatttaaagaagaaatcttaaatttaggaataaaagagggggtatgggaggaattgaaatggaggatgagtgagaattgtgtagataaagtgttctcatataaattcctcaaaaaatgaaatttaaaaatcataagaaaataaaaaataccaaaaatatatatggatatttctgttgtacattaaaatatgagtagcctataggcagtgttcagttatggcagcattagtgacttgggcagtctatctaacagactgtaggaaaacttaacaagaactcataattaaagatgctaatttggattagctctaattaattgaataatttatccttggtttttatcttaaccatgatcaagtagtgcttattatttaatcattacatgggctagttacacacggtacaagtaaatattaaaatacacatagcaacacatattaaaaaccaaaagcactagtcatcagggctacaggcaatgacagcaatcactttagcatcataatgaatttacttccgaaagtaacagatttaaaataagttgatggcgactgtaatgttgaaaacaaatctttaaggtctacgagatgactttcaacatctgaagttgcattacaaagacatacctgccaaaattgattgtaataaaatgggagggggaggcaaaccatgtcatctccctaagctccaactctgcatttaatataaaatgtatcgttcccctgcagactgcttggtcaggtaaactagtagaaaactgacacatttatggtactgtggtttggatgagaaatgtccccgtgggcttatgtacctgaacacatggttcccagaccatgatggtacttgggcagtacctaaattaatgctccattgctgtgaagatataccatgaccacagcaactcttaataaaggaaaacatttatctggaacttgcttacagttccagaggttcagtccattgtcatcatgtcaaggagcatggcagtgtgtgagcagacatagtgttggagaggtagcttagagttctatatctggatctgtaggtagcaggaagagatcaagcctctgggcctggcttggacttctgaaacctcaaagcccaccccaagtgacatacttccctcaagaaggccatacctactccaacaaggtcacatatattcactaatccctcccatgtactgccactagctgatgactcagcattccaacatgtgagcctgtagcggccattttcattcaaagcatcatattccacctgctagaccccataatcttgcagccatatcacaaggcaaaaactcattcagtccaactacagaagttcatgtagtctgtaacattctcaacactgtttaaaagtccaaagttcaaagtcctttttgaaactcaaggcaatctcttaactttaacaccctataaaatcaaaaaggagatcatatacttccaacatcgtgatgaaatataggaccaaagcaagacaaaaagctggtaggacaaactccaaattctggatctccgtgtctgatgtcaaagcactctttagatctccatatcctttcacttttgaagacggcaaatacacctttctttcttgggctggttccacacccagcctgtaagctttccttgtcagatatctcaggactctgtcatctcccaacatcttgggatctcctgaaaaatctcagcttcacctttacagtttcacagaatgacctctttgggcctccatgaagggacacccttgacatagacctggctcccgaggctctccttagacacagagggagattccataaccccttttcttgtatccttgtctgtaaaaccaaaactatgtgcctaaagcttccaagttcttctgcttgctggggctggaacctggccccctcattcaaatgtattttcatcatatttctgtttcctatggctcctttcactgcttaagctttttctctaattccttttcacaacttggatgcttaactgggtggggtcttgccctgagatcaccaattcccattcttccctttagtatcaggcttttctttattctgtttatctccttgattgcacttcctggtgctctctttctcctcaaactgtacattttgtagttttccttgctcagattgctccttttcattttaaatctgaataagagtgaatactaataaccaagcaacacagtcaatacaagcctgtctttaaattctcctgacaactctattgatcctaaactcttcaatttagtctcagacagatttttttggacaagcatagaatgcaggcatgttcttttgccaaaacatcctaagaatctggccatttactaatactttcctcctctgaaacttcttgaaccaggctatcacaatctgcactgttctcagcatcactgtcttccacatgccaactagtacggctcactaagttccacttaatacatcccactactagccgggcgttgatggtgcacgcctttaatcccagcacttgggaggcagaggctaggtggatctctgtgagttcaagaccagcctggtctacaagagctagttccaggacacctccaaagccacagtgaaaccctgtctcagaaaaaacaaacatatatatatatatatatatatatatatatatatatatatatatatccatcccactacttttctgatcctaaatctcaaagtccggagtcttccaataagcagctgaccatgtctgtcacagaaataccccaatcactggtaccaacttctgtcttagttcatattctcttgctataaagagatgccatgaccacagcaactcttataaaggaaaacatttaattggggcttgcttacaggttcagaggtttggtccactgtcatcatgacagggaacatggaggcgtgcaacatacatggtgctggagaagtagctgagagttctacatcttgatccacaggcagcaggaagagacagactgtgccaggcttgggcttttgaaaccccagagctcacccccaatgacacacctttaacaaggccacacctacttcaacaagaccacatctcctaatcactcccatgcagggctacttgctgataacttagtattcaaataaaaccaccacagggaggctatctaccttttgagaactggaggaagcttatccctgggagcggggtttactctaatactagctcactctttctgctttctgtggtgtatggaaatgtcatcagcaagtatccacgccttatccaccattagggcaatccctccagaacctgaagtcaaaataatttctttctgctgtaattttctcttggtcatggtatgtatcatagcaacagaaaaataagtaataccaatgctaggtaaatactactttcacagttagacatgcttctagctgagaattaatcatgagaaaaatggctctccacccaccatggtagtagccagagttgcagtcaatacaagttcactttgatctagtcacttcacaaatattctgtgttctcttcaatccagactcaatgtcaacctgaccctcaacctccatagtggcataggtttgcagaaaagttctcagagtctgaaaatgctcaggacaggttttcccccaagaacttcatgtagggagacaccataaccacgcctcctaaggacctgctacagggccggctgtcagggcgtggttaaggggtgtttaggatgatgtgtgggggattcttaatggactgtgcacatgtaaatagccccttctttctggcccctctctctggcctggctgccttgctgcccctggcacgctctggcttgcgtttgggttggtgtttatctgaatgaagaaatcttagccttacggactagagatcatctttgagcacacgctgcgtgcaataatcatcggttgacacccaacgtgggacacgaacccacgaccctgaaattaagagtctcatgctctactgactgagctagccggcttcccagaggaatgggaagtgctttgtttttatcctaacaggaaaacccacctccagaagtcaaaggacactacttgtgtagatacttaaagaaaagaaggtagctataaccatcaaacaaaaggaacatgccatacggtaaactttacagctatctctcaaataactacttctcttcatttcctagtccctattcaattaaatcaacgctggatttagagttggatttggctttcctcccctaaaatccaagcatgttatttaactaaattttaaagtttctgtgttatatcaagaagccaattgatgtaatacagaataaatgaaaaatttgaggactatcttttgtcttttcttggctttttctttcaaggcctacaccctctcataactgtcatttctcaatggttgcctttcccagtacacatacatgttcaagcaaacatttctctacggacacttatgtttgagtccctatgaagacccgcccgacgacaatccttggatgctcctgaaaaagaactgggccacacctctccgcctgcactagattcaatctactccgtttcgaccgacactccgaccagagcctccagtactgacttcaatcaagttgaggatttcaacctagatcttcaatcaagcaaatcccacctaacatggacttgagataacccaatagagactttccctgtgctaacatttttttcccacaggaccccacacggctaccatcatcccatttcagcaggaagtaacctagaagatgctatgcccactccccattattgtttattagggtagtgtaagcccagttaggaatgaccttcttattgtttagggttgggattggaaggaggtgttcaagttagacaccctttccacatcactttagggcttagctggaatagacatagttaagatgtgcaatagcagattactgtatcttcttgaatttcacctttatgattgttaattttggatattttacactattaagttttaatcctcttttagactaaaaggggaattgtagggagtcaccgtaaccatgcctcctaagggccggctacaggtgtacttaaccacgcctgttagggcatggttaagaggtgttcaggatgacgcgtgggggattcttaagggaccgagcacatgtgaatagccccttctttctggcccctctctctggcctggctgccttgctgctcctggcacgctctagcttgcatttggactggtgtttatctgaataaagaaatcttagccttaccgactgcggatcatctctgagcgcatgtggcgcgcaataatcaacttcacggtcagctaaggcaggcactgaacattgtgatagtcttttataaacttttataggtcattaagaccagaccatgtcaagctttgacagaatcaacttcctgattatttgatcagtataacttctactttcagcttcccatatccaattcattttttcagaaatttcccaaatatccttttgtcagccaatgttctttaaacctgatgaacaattcatatctaatcagcattttaaatgatagacaagtatttaataaaactctttgtgacccaactatagtctcttcaggttctttctacagtcaaaggccataaatataacatagcaaacaagtatggaaagaaggtgaaatctcaagtctatagaacaacacagaagctgggcattggtagtgcacgcctttaatcccagcactcgggaggcagaggcaggaggatctctgtgagttcgaggccagcctggtctaaagagcgagtgccaggataggctccaaagctacacagagaaaccctgtcttgaaaaaaaaaaaaaaaaaagaaaagaaaagaaaagagaccaacacagaagtcaactcccatgtcttcttaacaacatgtttaattagcacatatagaaaccctctaatcctgagcttccaacatgcacaggtaaaataacaactgtaaaacactttttctgacaaagaaccagaccctgacagcctccatcagagaaacttttgagtaagaagtatttatattgtcctaccgatataaatttgcgttttcctccattttatgcaagtcaagctacaaggaccttactttatcaggtaagcagaggttttcagttttatcaatgtcccaaggaagctgtgtttcactggttcctgacccaactgttactatgtcctttcttccatttcttaagacttaattctttttttctttagtgttttacaatggaagctagagacatgaatttaaaaccagcatttcccaacacaagtgttcagcatcttaaatcctctaaaattcttctttgtatcctttttctacattatattataattttgtttatcattcagcatgaaatgaatgtttctgtgttttgttttgtttttcccacacaactggccaaaacacagagaactgaccacggacggactgatgttcatcacagttgacacatttataacacaaaccttacacgtcagactcagaaagcaaaggaagggaagggaggaagcatgcaaacccaccctgaaaaaaacaccacaggaatggtagaaaagcagcacagtacaactggcctggcaacaggttcctcatccaatccaaaggccgccaagaagcagtggcagagaacgtttagcaatgagcagaattaaccgtcgatcacaaatttaagtgcagcaaaaatgaatacccttttacaatgaagaggaaaatcggggcatcgtcaaatgaaggggtacaagggtattagctttcatctaacttagctttcgagaatgacattaaaaacaatgacaacagcaaaaacagaaacaaaacaaagagtaaagctcataacacttatgctctttctcagcctgtgacattagatgtggtagttagatgcaaacattatgaaattgtaaaggtggtgctgagagtctgtgcaggaattactcaagacaattacatttaaaatcaggacgaggaaaacatccaagtggaagaaaggcttctgcccctcagagcaagtacaaagtgctcacatcatgtaagtgagctgtgtatatgtaaaaacagaaagccactaaaacactctgtaaatgatacactcaaatgctattttaaaattcaaggagggactggaaaacctgttcaagtatcacagggtgctttggggacagaaaaacagacagaaaacaggcaaaagaaaaaataataaaccaccaacaactacaaaatacaccaaaggaaaaggttgcagacataaggctaaagtataaataagaagctaagcattaagtaaccttcaatgaccaaatagtgaaaggtaagggaagactagattagaatcgaatattagcatttatccaagcatggaattacacacatgtaatatcagcaattttagccaggtggcaggagggcctcaagtccctgtccaggctatactgaattacaagaagctttcgtgaagaacaattaaattaaaattaacaaaatgcatgactgaaaaataaacactatgtatatgaaaaccaattcccatgaaatctcaggaagctggtactaagagcttgggggaaaggtattatgcaaacattcaaaacaaaggaggggaagccacatttgtatcaggcaacacatacttgaaaagaaaacagtatctagaagaatggtgttgcgtaatgataaaaagattacttgagcaataaccctaattgaaagaatcaaaagctgatacagcatcaagtaaaaatgaggtaaacgtacaaattatgacattttaacacctgaacacctgctcctcagcaaatgatattaactgcatggaaaaattagcaagattcaggagacctcaacataagaacttgtgtgtgtgtgtgtgtgtgtgagagagagagagagagagagagagagagagagagagagagagagagagacagagacagcactaactgaagggagagataaaacactaaaatatgcatggtacagctacaataatgcagagaggaaatttatgattataattagaaaataaatgaagttatacaattggagtatagaacaaagccaagtctagtgctattaggaaaggctcttgagattttaaattcccactttaagaaatttttttaaaaagatacaaatcaaacccagcaacacctgaaacatgaaaggattaaacagggtttgttccaggtatgtagtttttttttaatatttgaaaatccaccagtgtagtcaaccacactaacgggctaaagagaagtcacatgattatacagggacatgagaggcctctaacaaacccaatactcattcataacagaagatagatatacagtgatcaatatcagacttctttgcttgtgtctaggtagacttcacagtcttatctcatttatcagcattattattaaaatgaacattttaaatgataaaatttagtaattgtctttatagaaagaatggggttattttgatatttagacagttggatgctttgtaaagtttgagattttttaatgtatattaaacaaaagtgtagtcacaacatatatttgaaatgtgttaatactgaagtttgttttcaaggttataaaagatgacagattttctttattcacataaaggatgctgcctacaaaagtctaactagtatcacactcaatgatgaaatactgaattactttcttctgagatgagggacaagaatggtaaaaatgtctactcatgccattctatttccacagaatttcaggaattctagccattactaaaagggaaacagaaaatgcacatgaacaaatatatattcacatagcacagtttcccacacagaaaacccagcagatttaaccatattacccatctttatttacgactcccaatgggcaagactgggaatcacccaacctgcttatagataaataggaaagatatgcgaattgatgattgtatgttactcaactcaacgaaatttatactgtggtttgcagtagtacagacggaaatgagtggcactgtgctctatgaaataaactaacagagggaaatacatactctctcaaccttccatagaaggcaccacattgactgcatcatacggagataataaggcctatggccctaacaaccctgaacgcactgatctcatcaggtcactgaaatgttcaaattggacaatggttacttgatactggaacagtaagtatgacaagggaaagatagtggatagataatgcttccggataatatagtcaaataaaaggactgtttttcccactagcataatatggttactgtaattgatattagtttatggtatattttaaaccaagtagcaaatacttaaaagaatgtgaagaaaatgatactttaaaatttcggtgggaatataagtcagtaaggccattttggagaacataatcgagatcacacacacacacacacacacaccccccaaaacaaaaaataacaacaaacaaacaaacaaaaaaacatgctagaatcacagtggttcccagctatctcacttctgggtatgttatatgcaatcaaactagactgttaagatttggactgattataaatgtggtattttgtgttgactgaaactcttttaatccatgaaaaaaaatgctaccttatcattgtagtaaaatgaaaggagccagaagatatcatgcaagaacaccacaccacaaaaaaaaaaaaaaaaaaccctgagctctgaatatgaggcagtactcactagtcatagacatggcagaggggtgactgagagaaggactaagaaatcaaactgtagttagacagaagtaccaagttctagtactctatggcacagtggggtgacaagaggtcaatgtaacctatcaagccttgtgtgagtaactaggggaaaggttcaagtctctaaatacatagtaaaggtatataaacattagcttcccaatttgaactgcacatattgtatgcatgaaattgaaacattacactctagttcataaatacatgtaattatgttaattaaattattaagagactgggatgctaattacttcaattcaatctttgcccactgcagacatgtagcaagttatcccgatgtatcccataaatacatatgattaaaatatcaatcaacaaaacacagagaagcactacctatgcaagatctatgcttcaacctcagtcccctaagtattcagattttctcaggacattcagcactttatttttataacagccttctgcccacacattttgagacacactgtgtgtgtgatcctgggaggtgttttaatgaatttattcacagtggttagtatttgtccacagatgtgaggtcacagaattcataactcatccttgcaactgtccctttctaggtctcctttttgatccaaacattaaattcaattgttttctgtaaagttactgtggggaaaatacctgcaaagtatttgtatgaaacactcttgacaaatacctacaacagcccaagggtatgaactgtaagttacttcgcatacatgtagaatcaaaacctccttggtctcctccaccacacagaccctcacatgagccattggcccttatcctcaagttccagagcctctccccatggccctgtactttgctctcaagcccttttcaagtcataggttttctgtcccctcctacctttctctaacccccatggtaaaagcaactggatactaaacacaaaacatatccaattacttttctacttttcaaacatacagttaatggtcatttcatcttttgattttggaatgaaaattttatacccaatataaatacttattaatctataaatagatcacaagaaagcaagtgaacctatcataacctttccattcttggaaaacttgtcttttaaactattttttcttctttacatagatataaaaactagccttgaatacaacttgttattatatgtcaagactcatatagaaaccttgaataatttagaatgttgtgtttaagagagaaatagcaaagaaaatagatggggatataaaaccactcaagttcatgtttaagagcagccatagtccccattcctttatgaaatgatgcataccgtggacccagttctcccctgggcagtgtgcacactgctctgcctggtgatattcaaccaatagcatcccttagccctttgggcacaaaaacagctacccacagaaaaaaggcagaatcacccaagccttattacacttggcttttaggcgaagatgctatgaataccaatcccattagatgaacgggtttaagcagcaccatcctccaatgtggaccattataaatttgacagaatcaccatggtggcattttcaagactaggcattgtttaataaaaaataactaagtagacatgggaaaacactcattttattgcaaactacagttttagtgttgcatggaatcagcacagatcatgagatttgtatatatttcttttttatatatattgtatattttatggctctcgagtactagccatcttcttacagaaataaataggtgtgttcatcttcaaatatcagtttctaagtttaaatgttaatttattcatggctttctgtatgtcttgattaggagtgtccctgtagaaattatcttattggtcttatgcttttgctgtgaaatattaccctgatgacattcaagcttaccaaggtaaacactgcagcatgccatgggctgtccttttgtgcacatagaaatgagacaattttgggtgggtacatggcatattttatgcattttataatttttaatgacactacagtataataaaaattactaaattaataggattagaacccattaataaaaaatgagctatgtatcattatagatacccccacctcatcaaaaaaaaaacaattctttactgctgtaagtttccaaactagtacttttttagccatcttgcttgacacgatggatgtatttacttttaaataacttagcatatcccacaaatacatcattttgagcttccatgtaccactccctctcttcctccaagacagaatattcagttttcctcttctacaccaaacaaacacctttttgcctttaagactcacttgatgacactttaagtgcctttcccaacaggcctgatttaaagttgccaactttctgcattgagtctggttgctttcttacacacatctgagttcatcaagatgggaagaaatgatacacatgatatacaggccccatctcaggccagtgaagacttaatggagtatgagcattggaaatgttggcttcttctttaatgctaacgacttctaaaggtgaaattatggctatgaactggggcctacctagctcatgctatatatcaaaatcttgatttctttttctggtgcttctatttgggcaaattagacttcatgcaactagacacaccagagtactagggttcatcaactctatatcctttccatcaacaaaagttctacctttagtaactaaatttttctcagcatatgtgccattgtcttcacccacataatactgttccagctgggctacggtggcctgccttcacccctgtcttcaggatgcctgctctccttctatttagtcaagtgatgcttagcaagatgcaatccacccataccttgtgtttctcccttcttccccttactcctcatccatgcccatttcccagcatagccatagtttctcatttgaaaactgcagtgtctgacgatgtctcatgggaccactatttgtcattcacaccatgatttagcatctgcctgcagcagatgatacaggcttttgcatctttcacattcaacacatttcctgtcataaggggcattgtcactgcatatggtgtatgtagcatctttcccccctctgtcacagcctggctgaaggcatattacatgcctatgacttttggacatgtagatgctccagttacagtagggttagcaattcaggtctaagatggaaatagtctcagttgaaaatgtatttagtataccttagtcttccaatcatgacggctgagctatataggacattgaggaacgcagggggttacccctgggattgaatgactaaatgtaaactgaagctaattataactgcccagtatcccaacaggatattgtcacatattactttacatcctggaaaaaatcaaaacaaaatgtgctatacagttcctaccaaaactgtattattttcatgccatcataaagctgaagcatgcactgactggttaggtgtaattaagattaaggcagaacatacttcagtaagtcttgtattgaaagtaagtgtgtgtgtgtgtgtgtgtgtgtgtgtgtgtgtgtgtatgtgtgtgtgttagagcaaatttgggcattagatgacgacttgtgttcagttctctccttctacaatgtgggttttggggatttaagttgggctagtaggcttggtggcaaatacctttaaacactaagccatctcatcagccatgatttgtgcacagaactattaaacagtactttacataaaaataatcctgctatacatttaaaccacttagaggaatgagagatacagctataaagtatggggagtctttctatgattgtatagatatataaaacaaaacatagcacatacatgcactcttaaccatgtaaggatatttacaaacatatcaaaactatatttctattacaactgtcttttcagttcccacaggattttacttttgttggtcaaagaactttgaaaatgacccgttagacttttatgattacttatttttatggtgattagtttattaaaatgctttacttacatgcgtgtctgagtatctgtgtgttggcagaggatcattctgaggtcacagaaggcataccatcacctgagctagagagtgatgtgtggttgtctgcctattgtgagcactgggtatcaacctctggccctctgcatgggcaagaagttatttatactattaagccatctttacagcccttgtggtaatttatggattttaatttatggtagataaatttaatactgtaaatatgcaggctgcgttaactcttgggggtcccttctgtatcacacccataatgggaatatccttagccaatgctctacagctacaatcaccatttgccatgtgaatgtgtaagatgcttaatgctatatacatgaaccagacttaacaacagcagctattctaacttttaacctattgttccaaaaataattcataaattcttggttttcactttaatctggaaaactgaaaacatccagctaacttaggtgatggccaaatggctaaatagataggattctgcccaaagaaatgcacacccaggcttacatgactagacacatgaagctacaggtgtaatcaatgaggattagcaaaggagcaatgcaattaggagaccttggaaaggggtgaggttcaacgatgaacacccctagacagcattctaacccgaggaagtttccatggcatcgctgttccatgtccctcatcatcaggggcatttaaattgccatattaactgtgcatatgtacaggtactccaaggccgggacacttatttatctagtctaacaaattgttccttaaactgcatgtctgtctccagagctcttaatagttttcctttttcaaagtgaagacataaatcaaaacaacatacttcacaaacaaccagaatctatgcgctctctcctcctcctattgattgcccaagtttatttatcaatactctctccactcgtcgcatcaaactgcccttcttcacactgctgtggctaggctcctctgtggctctgttggtcagtgtacctagaagccttcaagatggcatagaacatgtgactggccccatttccaagatcatccttgaggctccactatcctgacacttggtccattgaatctcgtattttactgcaattcagcttagtttctagagaattccatcagcaattccttgaagctataggttctttgaagtgtgggaagtagttacagggaaagacaattttcacaggagactcaggggttttactttcaagtgatggtacagctaaacacatactttcaagtagttttgcctgccagtccacaacaaaatactcaataaaactcccctatatattgcaaaaaattaaaaacctgacttttagtagttatagcatatactaatctaatatgaatattaagcccttaaaaatctcctatgattatccctgttgtccttaataaaaatatgaactgatttttcaactttcagtataaaaaatgtggcttagtaaattcccttattacataattggaaatgaccaatatgttaagtcccaaagcaaagcttaaatcagtaaccatgtaaggctgaagtccccaaatgaatattaatttacagacttcccattttctgacagcgcttatctcaaaatgctggctttcaaataaatgcagaaacatgtatcactaaaacaattctgggtatttttgtgcttagcacattagatctcttctgttcatgtggctggcacttcctggtatctttgctgcccagggatctaatcatttatagccatttaaaaatgtttgggagaagttagcattctttacattttttaatttattcactatatatgtgtgtgtgtgtgtgtgtgtgtgtgtgtgtgtgatccatgggatgcatctgatggccagaaggccaagttgcatgtggccagaggataagtctcaggacatggttctctttctggggaattgaactgacatcatccggtttggtggcaagtctcccttgctcaatattctaattttgtcaatgagaagtggatactaagcaaacccaggtcatgggaacaaagcactgagaaaaagccatacaaagggaaaagggagggactgtgggtaaaaactgacacagaaacacataggatccaaaggctgtgtgaactcacatgacctggcaggggcagcaggagctactacatgactgcgttctgaaaacacaattgctaccgtgatgggagccgtcctgggaaggcctcactacatgtgctgctctgagagataagttcacactgtttcagtcctagaagctcccagaaagcagaacccatcctgtcccatccaggatctaccatgtggcccagggaggcaagctcactgaagaatgtatccagcgagatttgaaatggttggtagcttagatgccagttgaagagggttaggagactaggcatgactgcacaaatgcctacagtgacaaggccacaaaaaaaaaaaaaaaaaaaaaaaaacagagcagtcgtgggtttgctgtcctgccctttgggtgggctttctggagcagcctgggagcatgacacacagaagagacagtgccagcttgtccttctgaaacattttgtcccagtgatctccatctaaggaagtgtttggttttcttacggtactgagcagggaaagaactattccagtcagctcttactctaagctgttcccactaactcattgaaaagcaacacatccaagagaggggctgagtatcccccagtctttgctctctacaggggatgcttagcccaagaagacaaccaagttcaggggaggacaggtgggcatccatgtctgcatgagcaaccagtctgggagcagcattcagcccttttgatttggcatgcatatatttatatacacatcacacacacacacacacacacacacacacacacacacacacacacacacatttgttgattggtgtgcatgacattttgttttattttttcttctcaatctcttgtagctggtactttgttgacttctttaaatttttttgaaatcacaatataattgcatcatttccaaaaatgaatagaaatgtaggcattacattccttttgtcatatgtagaatatagaaacaagcaaaccaaaggacgagacatcagaaggagtattaggaaaaatggaggtacgtgggaagatggctccctggataaatgggagagattgctgtgcaagtgtgagggtccaagttcaaatccccagcacctacttaataagttaggcctggctttgtatacctggactagcgtgctgtcaggagtggagacatgagatttaataactcaagcttgctggctttagccaaaatctaggctcagagaccctgtccagggaatacagtagagaatgctagaactggctttcatggatacctgcacccacccatacatgtccacactcatcacacacacaagatccatggttaagaggggacacagataaccagggccactgtatgtatgcatggaagtcttacaataagatcctgtgttttgtgtagtttatatatggtaaacaaaaggacacatgactaatgaaagaggatataaagccaattaccttctaggtttctgttgtcagtaagtgagtaacaatagagttgacagtgacagtgtaaggtcataatagaaaccgtatggcttcagtacgaccattccaactgcatggaagttcactgagacgtatgggtttgggaatgggcaagtgcttagtcagcttcattaatctcaatgtgtgatgttttcatttgtgggttaattagagtagagtgattttatttttaaaacttaatagccaggcacagtggcacatgcctgtaatatcagcacttcgggaatggaagcaggagggttgccatttgcaggcaggctggacaacagctcagtgtccacaccaggcagagaatcaatcaagaagagccggcctcaaaatctcagttataatttcttaagtcagaaagaaaaaaaaaaaacaagcaaaaccccacaaaaaaaacctgataaactagaaaagataaattatcccacagtagacagacagtttaagacacaagctgcctcattatgttattggtgttgggagtagagtaatagcccagtagttaagagaacaccttgatgctctcccaggagttgaggttctgttcccagcacctacgtggtgacttcaacaactcctgtgactcctgttgcagcaggcctgacacccacttctggtctcccttggcactatacacgtgaacttaactagatacaggcaaaacatccatacacacaaaatgtaataaataaaaaagcatcactatgttaacctttaaagaagggaatatttaaaaacaataaattcccctaacctaggcaatgattttccctctgaagtgagtagaaatggcgatgctgacttcagtggtacctacaaggcagcactccagggatggtaatgcagccacctttttgaagttggaacttgcttcttaaagcttgcatatgctacatccacaaaagccccgaccattttcacagaccaggcaaagcaaagatgttattccttgttgtagacactgaaatctgccagaagcagacagacgctttggagttgtctacaaagtaccttttatctagaagtttctatttcctcattttaaaaattagagcccaatttggttgtactaatcagttattagactgggcatcttagacacaagataaacagttccctatctgttaactactgaactgctaggcagtgggaactgccaggatggactccatctattactacagggcctgatgttaggtgggatccaccctcgtcaccctatggcatagaacacaggggaactctgatctttatcaacattcactgagctattgtcctaaccataaaccctgagtagttatggtagctccatgaatgcttccataaagccaattaaacaattgtgagatgtgtgtgtgtgtgtgtgtgtgtgtgtgtgtgtgtgtgtgtaagcatacatatacgtacacatatacacatttttttcctttggggctgccactgcactgttatgcaaagtatgggatttttaacactcttatgaggtgataaaaacaaatgggtgtacactatgttctcaaattatcaaggatgatgtgacaaactaataatataaaacaaattaagaattctcaagaccctcccaccaaggaaatgtatttactacctgattcaaggatatatcgatatacagtttacacttgctttctttatatatagacatatataacaatgtatgtgtataagtatatacacacttgtttgtatgtatataaatgcatgtgtttgaaatcaaagaaaattttcataaaatgaacaaggctacaagtgtcctctcatgtgacaaggaattatgctgacccctgggtgagtgctcctgggaaatggagcacattctacctccggctggcctgaaaagcaagagtgtgttgggcagcactgaggcacccgaagccccgaagaaacaaaaagcttctctgtctctctttgagacactgtaaatgccagacacctcacagctctctcagcatctgacggcctctaactttcttccaaactgtggctgacaacgacagtgataatataacaccttccgaatgcctcaagtgcaaagttcactagttctaaggtcactgacttaatgcagcagccaagtttccttcacatcatcagacactgtctgggaaagacagctgtagaaaccaagcaagggtttaaatgctgccacaactagtgagatacaaaggactccaaaggagttaaacacaaaattcggtgaccaaataaaacagaaattccctggacatgtgattattgctcacggcatcattaccgttcaactcaggggctgagatttttacagcagcataagggggagaagacactaacacaccaggaggtacagcctgaggtcgctgaaatatctgtgttcctttgctgtcatttacatataccagggatttagacaccgctttggcttctctgggtaggtgccatttaaagaagagacaggatgacagatccctgtgtttaaccaaatgttaaatattttttattttactcacctgcacactgagatgaatccatttcttcataagaattctccctggtgtcattacttttattggcggctgcaaaccatttactgtgcgataataaaacatggtctctttctcggatattgtaactttgaacacaatctgcccatccactgtcttttccatcacacacctaaggaagcaaccagaaaagacagagaaggtcagcacccaaccaaatcgacatgcaggatgttgccatggtaatgtggccctgacccgcatgccaggagtgctttcactaagtaccaggagtgctttcactaagtaccaggagtgctttcactaagtaccagatccttgctacacctggagaaagctgtattccaacagaagtcatattattccagtaaaaaatagaattcttatttacaatatattcccccagagcctcaacacccttcattagagattcatgatagaaagtaaagtcacagcgtcctactggaaaactaacatttaggatactggctcatcggttccctggttatgccttttataggaagtgttaggacatcccacatacaacatgggtattgagttaccagggcaaatctttcttcttttaatgttaaggggatttagagcccaaggctctaaattattagccctggagtcagaattgctctactgtctcttttgtcttcatcttacgccatccaaaagtcaaaagcagtgtgtactagatgaccgcttgcttcttccatggccaggggtccagctgagacactgagctggtgggatggtctctgatggaagttttctttacaaaaaaaaaaatcaaatagtatcttgatgacatagaacagcttttaggaagtctctggggcataagatagacctactttacttcagggaatgggttttgctccctagcccaagttgattttcatcttgcagtcccagcatcctcagtgctgaggtgatgggtacaccttacctttctggactggaatttcttttaaaaggtcatttctggcctgattacctagtatgtgtttcagagcctgggactctttctaacctgactgctatccactcaggccaggaatctccatgggcaccgccaatcatgaaaccttatcttctcagctgagcaatgtgtagggagttcttcctgatcactaaacatgctttgccattccagtaggaacaagaatccatccatcggggcatcggtattctgaggatatggaaatgtgtagaatactacagactcctcccacaaaaaaagtgatcaattcattcaggagcatcccagaggcaacagtggaatcaggccacccaagacttgctgctgaagatatttcaaaattatccttacgaggggtaatttaaaatcctcacttcactctcacctccgttgtcctgtgttgggaaatagaataaggttggagagagcaagggtctctctttcattgacactaatttactgtctttttgcctgtgtttggcaacagagtaagtaaagcatctttttaattttggcaaatcattttaaataaaagctttttaaaatacatattatatatatatatatatatagatagatagatagatagatagatagatagatagatagatagatactactgcagactatttttttaacaattcagtaactaaatatttgtgatttactgacatgaaaaaaatctgcctgtatcctaagtctctgggcattagtctaagagttttcctttgttcatttgtcttgagtgtaaaatctacaagtgagaattcaatcattacacggggatgtatttaccaaatgcagacttatttccccaagcttgctgaaaatgcttttcttaatatgttattgattatctcccttgctattttgtttgcttgtaaacactctagctttggtagataataaatgggagacgaaggcaggtagtaaaatatttaggaactggatttattctgctcctgaatacacaataattggataatccatgttttgtttgttttacttatctagtgcaaacacccccaaattcccccaattcccataggtattttagcttcaagaatgaaaatgaccttgatacaagcaatggaccctccaaaccagaaacctcatgccacaacctctgtgaatgtccctgtagcttatctatacaaagtgatgacaagaggagagatgcttggtacagggatgtctctgtaagatgtgaaaaaaaatgttttaaaatatgggtgctgatggcataacaaatagcttgaatttctggaatttccaacaataaaacagcaaagtcttttttggggaaacagtagaaacaaggaaaatggactgtgactattttcactccaatctttaaacaaaagtaaaatgcttggcttccacttggcagatgggacataacacctctaagtcacatttgtttgtgagatgacaagattttcctggttatttcttaagttttgaaatactcacccaacacagccacacaaagtaaacatcacaaggataggtacccaacactgtactacgaggcaaaagatgaggttagagtacctagaacacactttatgtgtggatgaaaatgccaaggaaaatgtttaatattaaaaaaataataattagttggagctggggagatgacgaagagggttaagagcacttgggggctcttgcaggagacctgggttcagttcccagcacccacagtcagggctcatcaccctctcagcatctacaggcacttggactgcacctacccacacatacccttaagtccacacatactaacattttacaagtaaatcaaatgaagattgccaaaaatgttgcttgttaagtttctggcctgtctttgtattatttagggcacttgtctcacagtgtgagaaaaggttacagaaggaaaagctcatgatccccagactacagcaggttgtaggagagctcactcctaactcgtatccagggcatccttagcagatccaacagcagtgaagctctggaggacttcccagagttatctacttcctataaatttgaagatagaaacactgcacagtgaagaccaaaggctgtactgtgtcatacttccaactctgtcattgaatatattctgttaatcacacatttattgagaaaataaaggtaagtaaaacagtcctaagcctccagaaagctacctgcatattaaaacaattattttataatagagacactttgtatatataagacttgaacaagacttcaaactaacaattatttaatattactggcacctgggcctacaagtgcactctgaatttgattccaaaggagaggactaaaaagaacagctggtctttgagaaataaatgaactaataaaaaatgtctcaaatataattgatatttatcagtacataattatattgtatatgacatataattattatatataatattgtatatatgattgacatatgttcagatatattgccccccaacacaactatttcaacactttcttttccatggtcaattccattcacaacacatggaaaacatctcaggaaaagaatattcagattgcaaggccagaagggagggactaccatagcagttggtcttcaactgtggggaccctggagttgcacagctctattttcagcttgatattgagctgagacctcatattgcaataaccttcaaatccagtttcacagggtcttaggctaactgaaaacccacaacaacaatggcattactcacatcacgccttcttgctcagccttcaaccacacagctaaggtaaattctgctgccagccttggagcttgtagaggagagcagttcttgtgacttcggaatctaaagcttgtggagttgctcctggagtgaggatgcagctcagtgttgtctgccgggaggcagctccggaggccttcgaggagggcagtgtagggaggagaggcagagcggtaagggcagtcctgaatacatagcttcggggtgcacaactgttcgctcttagcatctgccacactgtgacaaaacgtgctggggcctgggaatccacatgtggcattgctaggcacagtggataccttcttgaaagcgcccacattctccagccttgggaaaaggccctgcgaggcagccagtgacactgcgaccaaataggcaaagatgagtgtttgaatggcccgatgcaagaagctcagaaggagagctaggcaatgcatggttacaaaaaagtattgttcgcctgcattttcgaggtttccctaaattaataaccaggcctgctctgctaccagcacatcagaggctcaccacctgaatactggtatttgccatctctgggacactgaagacactcttccacagggagggcaaagcaacgatatcctcagggagggcggaggcacgagtcaaatctggtgtctgctaaacaaacacacaagaagtcaagagaaacccgagttcatcctaagcacaaacactttgagccccctacaaaaacaatggggaacttctcaaaggccatcctgaatgacataacttagagtcaaaaactaattctcctgataaaggtcttgacatcattggacaagtcacatgcctcaatgtacagaacaatcgtttatatatgatagtgaattgtagcttacagctaccttgagctgttactcgaccccagggaattggcactacctgctctaatcaatgcggtaaagcatcctagagctcttttcacgaacaccatatgttgtgaccagagctaacttgcatatgcccaaagtggagctagctaagcagtctgtgcctctcccctcatcccagcctgtgcagccactttaagctcatggtaaagctgattagaaactcaatgccatctgcttgccctgtgccttaatatttatcaagcatatgtgttaatgtttccacatatgactctgtatttggaggttaaatatggattcctaataccgtgtaagtaattgtattgataaataagccgagttaccatttctttattacatttcaactggtcctctcagtgtgagaaatagctcctcaacaggacctctggcccatgttgcctggcaacccttgctgtaaccccctccttacttctagaaaatggaccccagcaataggaaggccctgaggaagacttggctctcagataaagaatttcccacagctcaaaaggttacctgtatctcagtgcaggtggcttggtggcccctctggaactgagctgtcccagctctcagctggtctcttagtcagtgggagggagtaaggttgggccatgcatgcttaatttttaaagtagcagtacacctgatcccatagccacctgccaggctctccttcctgtttcttgcttttatgaacatctctccatgcaatgcatttatcaaaaggacctgacagtataggacaggaaccctctaagaaattctgaatgctctctcattggaaggaatgatccagcatgaggcttcaaacttgagctgatgcccttaaaagttggccaactgatggcagtttctctagtcatttgttgacctgtcatctcaggacatccttttctatgcatgctttgattctttaaacaagagacatcttgtatttctaaacactagctttgtaaaatgcagattctaaacgaatcagacaagcaacaggactactgagttttagtttcctaattgccaatcaatgcaagggtacttgtgtgcacatgccagcagccatttctgtgtaattctcagtacatccagatctgtcttttctgtcctctgggttacaccatcctgcattagaaatattctaatggttcaacagtctttgtaactggagagtcacatcttattaaaaaaaaaaaaaaagtaagacagtctggaaagtagagagccaattgtaactgtgctccctgtaaatttttatagttatggaaatctttagaaacaagagatgtttctgaggtgctctccttaaaaggccatgagagacaaacctgaactatctttttcctgattgcctttcatttctctcccacaagaacatttcagcattagactgttgcacctttggtcaaaataccccattctttgcttactgagtgctttatgtagatggaaatttttaaattaagaacaagtgctggtgtaaagacagaggatttataaggacttatgtgagttttggaaaataagtcttgaaaacaacccaggagacaacgcaataaactaacatgttactgagacctgcactagagaatgcaatcggcttattttttggtttccaaacaagctcagttggtgagggctcttgtccccaagctcatgacctgggtttgatcctgagagaacagatcattaaaaggaaggaaagaatggactccccctggatgttctctgacctacacacacgcacacgcacacgcacacgcacacacagcaacatgtacacaaataaatataaaaaggaataaaacaataacattaaatcaggtacactgatgattaagggagctattcctacagtagtttctggcttccatacctaccacgcaagcccaggcaaccatacttacttccatgcacaaataccatatatgagcaggcacacacaggcacacacacacagtagggtatcagcagctctgctccgcagggaggagctctgcttgtcatgtgtaaagacagacaatgtagtaacacatccattgcctcaactttacaatttagtataaccaggctgtgttgtctcccatgtgaattacatgtcgatggttttaccttttggtgtctgagaatcacataagaaaaaggagaaaagaggaaactaaggtgaagagctaagttcagacaaatatgagcagccacgtaaacggactttctgtttctggctcattctggtctggaccagtgtaactggacaagccagcagagagtgtaatgccagccagagtgacagttactggagcctactcttggttcaatctgagggaggtagaaaatttcccataatttaatgtacaggtccttccctagcccctgcccgtgtcttatcttctaatgtattgagcagaacaggcccacggcccctgggctattccaatgagggactactcaaggcagggatggcacagacacctctcagaaagcatacgtagcaggaatgggaaaaatgtgtgaccattttcagacttgtccacaactcatattcttgatgtaaagccataatgccacgatggctcataatttctttgtgatgagattgtagtaaaatgtgtggttcaattatacaactttaaagaaattcctctattgtccaggtaaagttcacaatatataataagactgggcggagcttaggtttcaggtgccacagtgttagcccttgctcatggctaaaaacttaaataatgtgtaataacatattaattacaagaccaggagcataagctatagatgcagtaggagtatatacaagaaattattaatacatctacaactaatttgaattctgagacaagttgagcaaactgctagaaacttcaactcaagctcatgccaaaggaaatatgaaaacaaggcagatgtgtagcagctgcagaattcagcaggaaagtgtgtattcctgcaatgatgcaactcaactgtccaaaactgaacagctgtgccaatcagcatcaggtattcacatcacaggcattgtggtgaggggatgaaggcaaggcacaccctagggagactgatgtgttccatgcttgcatttcccttaagtataaacacttgtaaaattaatctatgacaatagaaattggaaggatactctctaaggtagaaaattgactgagaaaaggcttaagaaagacatcaagagagaacaaagataaaaaggagagtgaagagaaaagagaaatcccacaagagtgttaagagtattctgtgttctatttgggtacaactgtgcagtagttttgtttcttttggcctcctgatttatgtctctctctctctctctctctctctctctctctctctctctctctctctctctctctctctgtgtgtgtgtgtgtgtgtgtgtgtgtgtgtgtgtgtgaacactcatgtgcacacccttataaaaggagtctgaagacacttcagttccatttgcatgatttttaagtaggaattacacttatactctgtaaatacgttgtccttgtgggaaaatttttacctacagactttttagtaattagaaagatttgtgttcagcctgtcctttttaaatttaaaaatctttaaattgagatgtaagctatgcagtgaatcgtgtgtatgtctcagtgaatggcttgttgagtgtcttcatatctgtgctcatgtgtagctgccacccagactgttgaagagcaggaagaacagatatgatggcagacatggcttgccatttagagctcatctgggatagcaggctggcacagtgggtgaagacacttgtgtcaaggctggaaggaataactgatgccagtgagttgtcctcagactgccacacccatctgtagcacacactcctacgtacctacataaaagaaatcagtatgtgtgacttaaaatgtcaaagacctggtgctagagcagccctctccctgatcaaattaagatggactgcccattatcctggtcttggaatgacaaagacacatttccatgcagagcagcactaactacactggaggagccgaggcgatctcatcctctggatttaggaagtaggttcggtatcattggtggatgacactgctaacctcatctacttccataaaagtgaatttccctcagccagctgtcaggattgaccccacggaacagaataacctatgtgcatgctctagaatacctttcatctttcttattatcatgaccatagctaaaagaatacaagctattcgattcatcatacagtagaatctctaccacactgttggtcccaactggttggcatctattttaaaaatagcaagaacaatctagccatagtcttctggatgagactttgatatggttagcgctatatcatggaaaacttgagaggggagggaaagaggaagggagaggccaagagatggagggggagagagagaaaatgagaatgagaattctcaaacaagaaggagctgtgagaggggaggggctgtgagagtggaggggggattacaggtgtgaacatggctgaagcttaggagccactaaggatgtgagggcctaactggtcaagccagagaaaacagctgagcatcttggcagaaaggttaaccacagaattgaccgactaggagacaaaatcctgcatccattagggcagggagagcagcactttacactaaccccatggaaatgctcacagaagtctcaggcagaaaccacaccttcaatctaaggaacaccaagaatgcacctgcagaatgcttgcttctgtggggcaggcctgggatctgcctagaggcgtgatgaagatggatttgtttgagtggttccatcccaagaccaggactagagccttggtaacagagtattttttgagtagaggattttgtcaactttagaacctcacggccaagaagtaagatgcaaagggataagggataagacttgtgagagcactgactgatgactgggacagccagggacaggggtgtatccctaaagactggcttctgggaggctgagtaagcagtgctgaaggacacaaagagtacccagactgttgtaggaactcaagtccagctccaacaaattctagggaagatgatgacggcctcctctgtcttggggcagtggttctcaacgtgcttaatgttgagacactttaatacagatcctcatgctgtggagacctccaaccatccaattatttttgttgctatttcataaactaaatttttgatactttgatgaattacactataaatatctgatatgtaggatatctggtatgtgactcctgtgcaaaggtactttgagccctctccccccacaaaggagtctcaactcaaatgttgagaaccactgtcttggggagatataaaatacaaatcaataaggtaaacttagaagtgtgactcctaccattcagtactgtattaaagggaaggtggaatttgtgattaagaattccaaccagtttaaagaaatgtaatgactacctacaaaaaatatgtttggattgttaccccatagtttgtgtcttcacacataaaactgaacatttaacattcaattgttagagtcagttttccactgctatatttttaaataaagaactttaaaaggttcatataaagaaaaaattaaaattaaggtctcaatgacaatgtggagagtgggttcctaaattagtttaaaagtagctactggtgtcacacattctttacaaaaataaattttacatagtgaaataaaaaaaaatgaatgccaaccagagagattgaatgctgtcatggtaataccagctgctggctgtattttcatgggctagaccagtcaaattctttgggtttcaagttcctcatccataaaaatggaatagcattacccatatactaaggttgttgagctgtttaatgtagagacctcaggctattgctagatttccactggtgtccctcattgtgttttttcccactatataattgacatattttctagaactatgcatccagaaccaggagatcatgggaaggtatgggagaaataccactgctcatgtctctgtgatccagttttccaatagctctactgtagtattgtaacttccctaaatttcctatttaacctccataacaaccctaagaactgaacagagaaattcactccacgaatacagtaagagaaagagaggtagagctcacatacaagagaggagtgataggccagcatcatcctgtgttcaaagcactggcttaggataacttcagccatggaaagtttcctgaaagtagacaatgtggacatgaactttgactgtgggggatttcatagacaacagaattacctgcttgcagagactgagtttgaagttatccagtatgacaagtattctgcagacatacaacccttcatcagattttcatgtttttctgagtgttttcaaactattataaagtttaatgttagaagttctggagcctttgtttttgtttcactcactatctaggtcctcatggatcttattctgtcaccttgctggaaatgtttgaacctatgtggctgtccttcctcacccatgcgaggcgtggaaactttgcatcgatgtttcaggctgctctggacacagggagaatgggataccatcaatagcatgtggcagcccatctaattgctgtccgttctttctcctttgcctgggcaaggacccagagttgggctggcaggtgaattcaagagtggctttcctgatctgaggctggcagcaaggtaacagctgtgaagcagtgagggacaggtagaggccagcaagttaatggttggtgagcaggatgaatagaaggtgtgggtctgccaatgagaacactccatgaaggacagcaggcaagcagagcaccagccgagaggctgagtgcaatgcagacgggcgatcagcaataattacgagtcaagtttctgcaaagagctgtgatcctcaggctggtgcagccgctcagcaaatgaagatgctccaggctgtctgcaccctgggggttttcagagagtgctatggtattagctgaaagttaaagaaaggggggaggggagaagagaaagaaagaaaacttcatggatcaggaaacacagctaactagggagagcagtgtagatagttgtagaaaatcaacccacctgagcgtcacaactattccatagaacaatggtttaaggtgtgctatatttagagtgaaggggcataaagacataatggaggggacaaaaagtgatttgcttagtgggggaaaagcaatcatataaagtccagagagttatttcaactatggagagatcatatgacattcatattaccactatctaacaattctctgaaattccttttctgtataattttctgaggtagttgtggcagagtgagtattcctcattcaaaagaaccaacgcccaagtgccctagaggctgaagctatgggatcaccaatacatgacaaatggaaaatgtctctccctgagtgcatgtggtgggccacggcccaaacacaggctccgaaaaattttgtttaaatccccagctgcacatgtggctatgaaacacaagtgaacttccacttatattggggcctgtgccctagatatctagttattccacaaatgagaaaaatcaaaatatgaaacacttgtgctgtcaagaatttcagataaaaattaccctggggtgtgagcttcaggttaagaaaacaaaggtctctaggagacaactagataaaggactagaacagtcaaagctccacaacagattgtgaacgtatgcaagtactgtcattagaactcaacaagctagcctgaggagtcccttcttagagatagaaactataatccattctccaatgagaaatgttgacttcattatcactgttggagacaaaaccctgccctcagtgaccagaggagtatgacttcttcctcaccccatacaccaacatatctgattatcacaaagtcaaaatgttcacaaagaaatgaattgttggcaaggagggtatgaatactctttgatagcatctactccaagaatattagctgaggagatagtctgctaagcattatatttgaagtattatctcattaatcttaggaaaagtttcaacaggccaagtatggtggctcacaccttaattccaacacaggaagcagaggcaggcagatctctgtgaatgtgaaccgaacctggtcagcatatcaagttctaggctagccaaggttacatattgagacactatctcaaagaacagcaagaacaaactttaggcaatgattaattatcattattttctataaaaatgagactgaagcttagtgaataatgtattgaactcttaaatttactatttaggaagaaaagtaagatacaaatgaaggtttgtctaaaatttcatgcaacagactgtctgtaatggaggcaatgtcagagaatacactagtaggcattttcatgtattctaaatgttttctttaaaaaccatggaggtgattatgtgtagacagtgcagatataaagaatatgccactgactgataaattagtactaagcctaaaggattcttgaaatcttggttcagctccttgtttaaaaaataataataaagtattttatctctggaagaaatgaggaacatagcttgagatttacggaaacagcctccgtggactcagtggtgctcatctgcctccagttctcttgtgctagaataacagtaccagaacacattaaaaaagatcgccagaggaaaaagccacgaggctatgaaagtgagcgccaaggcagagctttgagcaagtacttgatgagattgaagttattggtagtaagggaatcactttatgtatgtccaaatgaatcaactgtaattttagcttaaagtaccactacagggattgtaaaattcttcctacctgaataaagactatctgatttgtagtgtgtggtgagaatggagcatgaccagaggcttacagcacagaaaaggaactcactggggttggaggaccagacactagaaatcaaagagctatgacagtctacaaaaggccaatttacagctgtagaaagaaacaagacaccatgagccaaagctggatgagccatggggtggggaagacaacggtcttcagagagaaaccacctgaggaataagagtatgagttacaccagaggtcgttaacatgagtgaccacgaaaggaagagaggtaaagaaagacaaaagtgaagagagtgtgagagtgtgtgtatgtgtatgtgtatgtgtgtgtgtgtttagtaccattttcttaaaccagtataatgtgctataaaacaattttattttacttttcttctccctcgttaaaaacaaattctaagaaaaattgtaagtcagccactaagattaccacagcacactgctgtgttttcttctagtcttttgactctatttttaagaaaatcggtctagtaatactagtatttatttcccttgaaactactttttaactatgactttaagcctaaaagagtaattttgcttcaatatgttttaatgattctaaatttagtataacttgattagatactatggggattttaaaggcataaatgtgttacccaatctttttaataaagctataagtacatgatattctttctccccaattataagaaacgccaacaggagacattacaaatgtttaatcttcactaattcaaaaggggtgaataaaatgtaattcctgtgtttaagtattcatttctttgccggtaaatgtgagcatttgatgacacttgtcatcattgtttcattagtgcgtattctctgcttctcttgttgagcattcaatttaaaaataagttactattcactgcatattaagggtattgatcagtgggcatgccttcagaaaatattttccctggttcatttcatatattaatattttcaatgaaaagtgtgtgtatttaatttattgtcctgcaacatatgcaatataaaatctattttaatatcatttataagtgggtagttcaatggcactgaatatatgtttagccacccatctccggtaagttcctttgtcccctcattgacactgttcctaattaagcaattcacagccatccttctcccaacctttgccagtcaacatgttagtcaaatccattgtttctgtcaaacaccagggaaaacagaactgtggatgttgttaactttggtgagagtttcagaggctccaatccatggagcctgggagagcaggacgaaggagagcaggacgaaggagagcaggacgaaggagagcaggacgaaggagagcaggacgaaggagaggcctcacactgttgcagtcaggaagcagagatcgaggggcaaaaatgccagtttccccctttccccatttagttctccttgggcctctagctttgggacagtgccatctatgttccgggttggtttcccctcccagttaatcccattgtacaagtccacaaaaaagatgcacccagatgtgggctttcctgatcttctggaaacttcttagtccaatcaggttggcaatcaaaatgaagctgtattacagacatgctgctttccatctctggatttagctaccttggctagcacttgaacaagtgggatggtacaatggtatgtttcacctggtgtggttgcttttttttaaaaagggggaaaggagagaaacaatattaaaatgtggacaaaatgtataagcagatatttatgaatgatttaaaaactatttcccccatgattagagttctaaacagtagccgcacgttctcctaagctctcccttctactcctctctgacccaaggaaaatctatgtgtggaccaaaaggtgtggctggcaggtgtcagtccatgcttgtctgtctctcccatcaccgcccccccattggggttcttctctcttggttagtttgaaggtcacactgaacttgtaacaacaatttacttcttcaaaatcaggttcattagctccaattttctgacttaacccttggcccccagaattctctgtctaagagctcttgaggaggaggaagggatgggaaaggatcgagggcgggaaccagaagagcctggaggtaaagggaaggttgcagtgggggaagggaatgaatgagacccaaacacagcgatgcacatggatgaagacgccatgctgaaccccactccttcctgtacggactgaaaatattaatgctacagggtccctgtagagtctggtttgccgtgttgatgaacactacttgagaaatgagggaacaggtcatagaatgaactcaagaatagcaaatataaaatcaattagcttagctctcctattgccaaatgttattaaaccaaaatctgcgttggccccaccttgaaggagtgcatggataacactcactcttcctttgctctttgcagatcttaatgcctacttcccagaatgcttagagttgctacttctgttattgctaaagaaaccctttcagactcatgttgctattttatataaaatttcatgacaacttgacttggctaatgatgaacctctagttctgttctggttctgcacaacactgcttccctggtcttggctcctttctttctttcctttctttcgtttttatgttgttgtttttcgagacagggcttctctgtgtagctttggagcctatcctggcactcggtaggaagaccaggctggcctccaactcacagagatccgcctgcctctgccgcctgagtgctgggattaaaagtgtgcaccaccaaagcccggcttcttggtttcttaatgctggcttctctcttgtcttgctaacagaattgtgatttagggtgtgtttcacatagattaaactaatacaatgcattagtcctggcaggtacaatgtacagattttaaaagcaagacaaagggaatagatagtctctcctgagaattaagatagcagtctacagccacattttcagtttggctacattccacatcatcagctaactgggctcacagaatgtttccaaatttttaaaagatgatgtcaagatttattctaactatggttttgctttaagaaacctgcgatgtttcagagaatgagaagtcccctaactagtataacataattatatgagcggtactgagtattataaagggtagggctcctcaccaaccttttccaaaatgttcactctagtttttgtcgtgtttttgttttgtcttttttttttttttaaacccaggctatgttgaaaagaaaaacaccctggaaaagagatggaaaggaaaaagtctggtgatcaggagggggaggggaggggtcctgctggtgatcagaagggggaggggtcctgctggtgatcagagggggtcctactatcagattttataaggtcactctatcaaacccagcagagtgcaatgtgccttgttccttgagaggggaccttaaatgggtggtgagctgccaagttaagaaaagctcaagtccagcaagccagaacttcacaggtgctccccatcctacaacagcaacaacaaagacctggaccccacactccaaaagcatacacccaaacatcccaaaagctacattctgacaatatgctagaatcaattacccaattatcaaatgcacttctcaccctcagtgctcagcaacttgcttccttatctacagaaagtatgttataatcatttcatgcaaaatagtctggggaacgaagttgttgtgaacagggaaaaaccctcaccaagagcctgagacagagagaggtcatcagacacactgtaggagactgggtggtgagagcaggtggcagagctgagaaggatggaagtcttttgcaagagctgagaagccagttatgtggactttcctcgcgggccatctgtgtgggtgtctcactgtgagtgggacagatctaagttggttctccagagactgctgatgccagggtgtcattgggctcctgatatccatagaagacaccataaggctccagaggtcagcctcccagggctcaagacatggcagttacagtgcgggaattctgatttcactttgtgccctcagtctcaatctgcctgcctccaggaatgttaaaccaaggttgactgttcaccacgcagcacactcttcctgctcctcactatcccattgtattcaaccctcatctggagctcaaagagtctgtgacccatgcaacttccttctttaccatcccaggccagcctccaggcacaccctgccagctccaaaaattgctcaacagcggtggaactgtaatttcactggcttaccctcttctgccctttggtgccagtttccacagaagcacagcttttggttttcacatttgaacttctaaatgttgctaaggaaaaatagctgcttgtgtggaccatagagaccactgaatctatcaacttctgactgtaacttcacaacagatcccttgaaaactagtgtcgttcctagtggcactcagtcaacttctcacatcccccacgtgaatgcacccccagtcccttctctctgagagatgactgaattccacatggggaaagcaaggcagcacagcctgcacactctccccttacagtgcaagcccctgtctcacctctgggctttctggggaaaaccaagtttctcttctcttggcaccgttgcacccattttttccccttgattttgtataccttgaattttttaaaattataccttcatcttttatctctgtcctagcccctccttgctctgagctgccctcaatccccgctcaagccctgtgaaagtgtagtccataatcattggttctgtgctttcactccctgcttcctcctgttcttatgaggtatacactacattggataaacctgccttgaaatcatggtggcctcccattggtcaaatctgcaagccaattttagctctcgctctctttaaactattagcacctgacacattgagtcctatcttccattgttccctctttacaaattagtttgctcacttgacttcccgatttccagagaacccagttcaagtcccaggtcctacatggtggctcaccatctataattccaggtccaggggatctgataccttcttcctgcctctgcaggcaccaggcacacacatgatacacagacatgcttgccaccagaacatccatacacatatagttaatcaactaacaattttaatgtacatgaaaacatatcacgaagattcttacacaaatgttaattgtggcaagaactggaaacaatccaatgtccatcatggcacattcattgaatgagataccactgagcaatgggaaggtagggtccactgatggacaaaccttggaaagcactttaagtgaacaaattcagaaacaacagatgaaaacggtattatttcactaataaagtgttacggaaaatcaaactgatggagacagaaatacacattcccatcagaggctggatgagcaaaggtgtctgaagaggactttggaggtcggaaaagtattatcatttataccctcatagatgtgatggtgacaagatggcacattcttatgaaaatttactgaactgtacattttaaaagatttaaaaacaggagctttggctatgaactacactcactgggaaagttctggaagcacaactgttcccatgacatccttctttctcatcccacattaaagcaagcttctgctcagaaccaactcactcttcaaaattgatcatccacaagaccatgcttcaagccccacctcctgccggactgtttcttgaccttgtaaccatcttgactgtccagctcctctattccaactgaagtccctgctgttattcaattaagctgattccagaccagagacgcctggacagacggtccccagcccagatctcctgtgggcacaacacacagctaacataggcgcagcagagtgactaacagttggaaccagggttttctggttcaactcacaccgcaggcaaaaaaaaaaaaaaaaaaaaaaaaaaaaaaaaaaaaaaaaaaaaaacattcccctgggtttgcttcccataaggtaaatagcatcacattttaaatggaactcattaaatacattcataaaagcaatcaagatatttcagtaataccacagagccttcacacaactcataaaaaataccattttcctgattaccagcctttaaatgtggctcccaaataatgcatttatccttggcctgatgatgaaagatatatgacaagtggaagctaacttcttgcccatgtgtaaacattttctgaacattgtgcttttaatgtgagattcgtcagccaatctcaataatgaacgccgttatcagctacagtcactaaaaatgtagagagaaaaaagatggagggtatgtaccatagattagacactcacatagctaggtgattatgaaagctacgatctaaaaatgcaaattatttagtttattagcatgtatatgccattgttaccacaaactggtggcctcttctcacatgtatcccttaaaatacctcatctctgtgtttacactgaatcttagagatgcctctatgatcccaccttaaagtagcttagtggtctggtttctcccatggctcttgtgagacaatgagccttggcaaggtggtcattacagggatctagcagggcgtcagacatacagcaaccttgacttctcagcttctgcatatggatgctgggatttaacttctggccttgctcttcgttccttcatagtcatcaacagaactgagaaatgtgatcgcacaatagacgcttacagcagaaggcatgactgaaatactgctctgttccctggttcatagtctcacggtcctgttttttcccctttactgtggcctctgcagagcttacagacatctgtctgaccatctctagtacctgaaactgcatgggacctagtaatgtccactcctagacacaactagagacagcattatccctgtctttatttcatttgaatggcgtgtgtgtgtgtgtgtgtgtgtgtgtgtgtgtgtgtgtgtgtgtgtgtgtgtgtgtgtgtgtgtgattgaactccagcatgagcctatgtaggttgagatgagaggccaatggtggttgtctcaattactttcacattatttgagacaggatctctcactgagcctggatcttgatgactcagccagaatggatagcaagcaagtttttcacttcctcagaactggaagttggcacataccaccatacccagcttttaacatggatttcctggcattgaaccatgcttcaatgtgcttttgtagtgagcatgctagtgaatgggctgtctccctggactgttcccccaggtttgagttattattatttcaatacctacctgtattcccctttattttcatccgtctctgttatttacttactgttgtaaagctatgtctgtgttattccaagttcatgtagtacactgactgtaaggaaagcaatatattgatttttaaaaaaaactatctggtataaatatctttatatcacagctattttgtgttgtctgcagagtacactatgtaagaactcgaaagcttaagtgtcaaaccctagtcactactgtgtgtccctctggtcttagtcactactgtgtgtcatcatccctctggtcttagtcactactgtatgtcatcatccctctggtcttagtctctgctgtgtgtcatccctctggtcttagtctctgctgtgtgtcatcctccctctggtcctagtcactactgtgtgtgtgtcatcgtccctctggtcttagtcactactgtgtgtcatcacccctctggtcttagtcactactgtgtgtgtgtcatcgtccctctggtcttagtcactactgtgtgtctctctggtcttagtcactactgtgtgtctctctggtcttagtcactactgtgtgtcatcatccctcttggttcccagagcagggaaaagtcattatgactgcttagtgggggaggtatggagtcacattcactctgcatgtttagtccctctgcctcttagttttctagaacatagaaatctactggtggatttgtgaaacagtgtatttctttttgcgtatatgtttctcttctaatcagccaagaacctatttaattttctttaaagagaataagttgcagggtcttttttctgcatgaaagctaacgtggggttaagtaaattagacttctcagtgtctcatggtaaatgaagcctgaattataactctatcccctaaccagacaataatcaatatttcagtgcttaactgtaagtctgtggatagaataatatgtcctctaattttcaagatgaaagtaaaaattgtcctttctatcaccacagcaaggaaccaatgaacaatggtgggcagagtaggcacattgaaggaatttgggtattcaagccttcactccatcaacaagctcaaaatgcaactagtccttctaatagaatctaaatagctatcatttgtctcaaggaaggatagataataaattcatggtattagcagcaactagatttgtatatacattaaagtcttaatttacaaaagaaccaatttgtgtggttagacagaaaaagcacagcatatttcttaatcagttcccatgatctcatttaccttatcaggatttgttattatttgtaaaattaattagcttcccctttgcaccatactttcactgcttctctggaaggggaaacagtggcttgtaggtcccgaaagacacatggactgaggctggcttagctggtgactaatggttcaatgccgggaaatgcagcgattcccctcagagctctgttgggtaagtgcagagggacagaagcaaagcggccaccacttgtcccacagatggacagcccatgttcagctgtgctgtatgtgaagtctgggcagatgcccactgcagagtaagcttggctcacaccccaaaaaacaatggttgtcaagaaagaaaccggagatcgtctaaagtctgaggatttgtgtgggtgacccaagcacacctccccctcctcctcgcactgtggaaagtaatcttaagtctaaaccaagcacgttccatgatcattagagtctgtaccagagtttggcctactgttaggattagatacacagtgtctgttatcgagaaataccaataaagacaaccttaatataaaataataaattatatttcaaaaaactattacaaagtgctgttacactgcaaacattaagccaattaaatatacaatcaccttaagtcggcaaccactggggactgtccgtcactgggtgaagagaccacgctgacactggtggactatttgtcaccatggtgggtgaagacaccacactgacactggtgaggattgtctgtcaccttgatagttgaagacaccaagttgactcaaacaataatttatacgtgatgactccaatgtatgcaatttctcaaagtgtttcagtgaacaattaagaaatagccattgccaggcaaatcactgtagatgtggaggcagggttatgagaagttcaaggtcagcctcagtcatatagtgagttaaaggccagactgtgatataggagaacttgtctaaaaaatagagaagagagaggaggaggagtggcaagggaggaagggagggagggagggcgggccaggcctacttgtctgccttgtatgctctcccaatttggttgtcatatggttttgatggggaatgtactgtgtatgtttatcttattgattattaaataaaatactgtttggccaatgagacagcaagtagatgggactaggagtcaaagaggattctgggaaatgtagtagagaagtggtgatccaggcaggaagtgacatagcaaggagactcatatttaagcgaaggagaaacaggaagggcccccattttccctccgctcctgttccagcggcataatgtattccaccagcaaggagggatgccaataaggcgtccgataagtcttataaaatatatagatttatgataattaagactgagctaacagatgagaatcctagtcattggccaagcagctttaaacctaatacaagttactgtgtattcatttgggcctaactcgggcgggcgtaaagctcacatgtggccgtggggctcaggcggcttttggtggaaagatttatggtaacatggtttcgttcttagtttttgttgctgttgttttgtttggctccctttggatctctggggatttagcaataaccaaactccacaggaactatttctttgcttagatgtcatctatggttgaaagatgccccaatgcctacatcttgaactccaaggtaacctgtaccttggagacttcaatgtcaaccaaccagtatccaaataccacacaggattctgggggcaggggcttaactctacctgttttagtcagtagttctcaacactgcaccccaggatcccatagtcaccaatatctaaagtcactacttgctagtatctatctcttttgctaagtaataccactaaaaacagtatctttagaaactcatcagcagatcacactttgccgccttcttgctccctgttctttaaccctctccttccacatggcctacagcttgctcatgagacttgtatgtctgatgtcatcaccctgacttcaacaccctggggacaggattctttgaccacactctgtgtaaaaagactcacatacctaccatcatcactttttttccggaatccatttctgcatctgctctttcatttacccagaacgcatttcctccctggtgaaaaccaccgtttaccttaaccatgaaatagagagtaaaacccaagtccacgccttccctccagcctgcccagctctttccctactttgccatttcttctcccctgctttgtgctgtgctctgtactgtacacagtccagagctcagagttctctaaatgtactgtgtattcagtacttgtcctacaaagggtgactattgctgtgatgaaatgaatgccatggccaaaaaacaattggggaggaaaggctttgtgtggcttctgcttccacatcacagttcatcatcaaaggaagtcaggataggaacccggaggcagtagctgatgctgggacacagaggtgtaacaattactcatttgcccaccgtggcttggttagactgctttccctttcttgtccttatttttttccttatctcatacaagacatcctctcccttccaccaccacccctgcccctgctcagatccactcctctatttcctttcagaaaacaaagcaggcctcccaggaacatcaaccaaacatagcataacaatttaccacaagactaggtacacaaattgtcatatcaaagctagattaggcaacctggtaggaggaaaagggtcccaagaacaggcaaaagagtgagagcctccaccaaaccactgtgaggagtcccacaaaaacaccaagctcatgaccatgtttgcagaggacctcgtgcagacccacaggcttcaccagtgacgctccagtgtctgtgatcccctagcagccctgctgagtctgttctgttctcctgctgtcctcatccttctgtctcccagaattcttcctccccatcttcactaggttcctcaagccccaaggagaggggcccaatggagatctacaatttaggctcactctctgcctaatgtttgtcagcctctttgttttttatatgactcaggaccattggcccaggaatgacacaatggactggaccctgccccatcgatccctacatggtggcttacaaccatcggcaactccagttctagaggactcaatacccatttttggcctcatagaacattaggcacacatgtgatacgtagacattcacgcaggtaaaacactcacacatgtaaaactgagtaaattaaggaagagtgagggcattttgccttttcctgttagaactgttgttactatggctgtaattcagcaatacagggtaaattaatgactgagccagacagcgtgggataggctggtctcagaatcagaagacaaatgtgcagctttgacatgttcttggacagcgggaatgcttgcacaatctactttaagcagctaaaggttttgtaatcacctctctcatcatactttaagatataagtatgcaaatggcctctttcaacccaagtacatcagcagcaactgtcttgtcctcacccaccactacttgagggaacactggatttaaccagtgactcccaaacagtgtttagaagaagtgccatcatgctctaccagcataacttgggagaatccatagagaatagccccttcctctatcctctgcctctctgctctccacacccagccccttcccaaggtgccgaggtaaaagctgactgataacattgtgttcaccaccactagctggcctattatgatctaaaactgggtttttcttcaatgccaagggaaatcccatgagtatctgttgcttgaatatcaatgggcaagaattctgaagcagaggagtggaggtgtaggagggggctctcatggggcatttgcttcaggcacagcctctcagccaaagtctttctggctgtggttcacacacaggttcattctttctttaagagatacagtaagaggctccctgcttagacatgaactcaagctgttgagttgtatagacaaggggaagatattctgtcagcctttgagatttccttttaaaactgtgaccagacattcatgtatacattcagactttcattttaatcagcaacctgcaaattgcatattcatttgcttagacacagggcaggcactgttcttagagatagggatgttcattgtattacagacacagttccagagaaaggaaatcttggttgaacacaacgtcctggaggcaaaagtgttataagaaaacaaatggagttgggaaacaggactcccaaggaaggaatcttatttcaaacttcctggaacaaagccaaccacgtcgctggtgactaatttgcaaagaacattgccttgttacactgaagtatatcacaccaatatttgtctcttaaatatttctgtctggatccatgcactttcctgcataaaaacttctagttgattctaagtgaatccattcttacagtcaatgttcaattccaatcatcaggactggttttacaggttaatatagagaatatctttctagaagctttcatttgaaaaaaaaatcagccttatgcattacatgttgaaataaaattaaaaaaatattttatatttcttatatctcctttttatgagaaactgtcttcatcccatgctcacctctagtcaagatgatttaatggcctgagaaccttcagatttccacttagtaagacagagtaatttatgagcaacgttgaatctatcatcctcatcccactctgacttctgagtcacagtagtaatgggatgacaaagccttccttttcatctaaacctgcatggcaattcccccttcttccatcttcataccatatacccttacagtagctgtggacagccatagccatgagttcctcagcctctctcattcccccttcagaacactcaccatcttgcattgtggatacagagaaccatttcctccaggccacggaagtagattcagttacgtgttcacatccgtctctccgtcacttagaataaagaggctctgaagagccacctgggcatagcaggaaatacatgaaagacaaataagatacaagcaaggactataggtttagctgtttgagccctaaattatatattcttactgattaaaatgttaataattcagagagtttggggtttaaacatcaaattgctaacaaaacaagtaaataattgagcaaagctttaaatggaaggtagactggtgccccaaactgaaggctgaggaggtgtgagggagtttgctggtgctctgcagtcagacaacgtggctgttgtgggacttctgctgaacagtgaaggagactgtgactacgcccttcttccgcaacataaactatgccaaactctgtcattcactgctaacaggcaagaaaaggaaaacaaagtatggtgagataatgccaatgaacctctctctctctctctctctctctctctctctctctctctctctctctctctctctctctctctcacacacacacacacacacacacacacagagagagagagagagagatgccaaagttccctcctgtctaccctaacccttccacttcaaaagcatctaatttgtattattctcttcccataactaaatgccaagccagagaaatgcattgtgtgtcttcagaaaagggcaaaaagaccagagttgaaggaggtcaaagagtctcccaagaagcgtgatgaccgggagcattagggccctgcgctcacttggtagagcccatttactatgatgtaacaggaacaacagaaggcagagcagtcaagaaatagcagcacagagataatgctctcctctagactccacaacactcaacactccccctcccccaagtctccaaaagtccagaagacaaatgatactaaccacaattttcctatgcgtccccaaagaactgggtgagcactgagatccatttactataaacagtctagggaccttcagttcagaagaaggaagctacagagttcaaaagaaaaaaacacaccaaagccaaatactatacagatctacacttccttctcatcgcatggcatggctgtgtgaggccacctgaggaccaggaaggcaatgcccttcacaagggcattgataaagagggtgctggtattcaactctggaaggactgaggaaacctgtaactgaaacacattctgcggtgaggggagtctgtggtgtgatggacagagtttcccaggatgacaagaacatcacatctattagcccgcactgtaattccatttggcagactgcatgctcgggctgaggagtgcaagtgtaactaaacaatctttcaagtgtcatgaatacctgaggacagataaatacaagcttaatgcattttgtctaaatcaaagacagccaagataagggcagtaagggaatacactgtagacacagatgtgaccaataatttccttgaaaatagagtttaggatcaccattaatatttcataccaaatgaaaatattacattactatttaaatttagcccttcttaacaacacagtgtctatggggaggaaatgagattgctgacctaccgtattagggtttgtattttacatttctacacacagagtcctttttttacctttatacaggagaatttggtcaggagctgggtcagtgattaaaaagaaaaaggtaactggataaaagtcaaagatacacattttaaagtcaggaatcatcttcttcctcgctggtttgctgtccttgcgacgggatacacagtattcctcattgctcattaacagggtctttgaagttaaatcctagcttgcccactcattagcaatgaacctcttcaaagagtgctttagagtctcagtttacccatcaggagaagagagagattcctggcgaccaccacttgggtgtgacagttttgtgagatgtaacatagagctcctgggacagagaacacatagcagatgctaccgagagtttacagtcacacccatttccactggtagcaggttttgctgtcctttaaagttcatatggcatttcagcatttaagaagcatatctatggcctaggcaagatggtagatgcctgtagtcctatcctggctgaagcaggttagtgaatttgaggccaatacctgttctacacaagtcctgtctctaaacagcaataacaccttatttttttttatctattttaatctttctcacagaaccaaggattaggtggtgttgaccaaatagttaagaaacacgctgaagcttgcagattcttaacactatttccaggctcttgtcaaattttctactttttccagctggcttttatgtggagcgttccccagataggaagacgttaatatcacattacctgaagaggtccaagccatgactgtgctgagcaagcaccacgagcaggaagaagtggtgggaactcgggttcctgaagaacagaccaacccagggagctgctgatttgtgcaaacatagtaccacccagagaggctacatccagatttggggtattacagggttgcactgtgcatggagcaactctactcatgcttagttacaaaccaaaagaactgaagctttggtgtaccaggcttttttttttttttttttttttttttctcccttttaggccaccaaccagcccacaaatcctaacacaaagacttattagttttcaatgcctgtgctaagcatatctcttttctggctagcatttttaacttaaattaacccattttctctttatctacctttgcctcggggcttactgcttttctttccttctgtacttcttactttcgattctcaggtctgctggctggaggtgggtggggggtggggagtggagggatgggggatgcctggcttctggcgtcttcctccttttcttattcttcttttcctcgagttggcctcctatttattctctttgcccatcagccccatctaccctttctcctgccttgctattggccattcagtttttattagaccaatcaggtaccttcgtcaggcaagctgaaacaagtgcaacaaatctttacataattaaacacacatccttacatcattaaacaaatgcagcacaaacagaagtgacacaccttcacacagttagagtaatatccacagcatcaacacatgtaacacacatttacacagttaaatattccacagcagaaacaaatgtaacacagctttgcctagttaaaataatactccacaacaccttggtgatcttgtcctgggcagatcctcccctgtgttgttgaaagtgaggctgtgtaaaagtgtgtagacattgtttctactaataattggatgatatgggatatactggtgtatttgcatcaataataaaagacaatgtttgaaacagggactttccagatattttgggatgtccaatccatggagagactttgggctactatgatgttcataatcccaagttctatatgcctcttgatttatgtttttccgtttctgagaagttttaatctaaatcaaagaggaactctgcttagaaggtgcaaaccttgattttctttctctctcatgttctttcaaacccgtcccccacccatcttacttcaagtggacttaaagtgacagtcattccctgatgcccctattatgaaggctccagataatagcaaatgaagaagccaaataaacactagcaaccagatacttgtcatgttggggaaaaacaaaacaccaaatttgttaaagcatggaataagcaaccctagtgaggagcgctttgaacccccttcaaagtgtcaaggtaaattctgacagctcaagaaaatatggaggccaatatttacagagattactctagaaggtaatggcaataatcctcacaattagataatagagcctttccatattaacataaatgatatttaaaaatggaaacattaagccactgcaagcataagctccaatattaatggggcacataaacaggaaaaaatggttttgtgctatttaatctcaaaaaaggcttaatgacccttatctgattatcaaaacagcagaagcaactgtattagataaatgggacattataactaccgttaactgggaggcagcttggaaatatctaaatgagtgtatttttagatcaactgtaatagtcacaagaggaatactaaagagatgccctggatatggctatgacattggcaaacttgaagatacaggagggatgcaggaaaagcacctggaaaacaaaccagactgttaactgaggccttggctaattgcatcgtggttctgcagctgccgatgcatgaatgctagatcaatgcacacaccttcagcagaggggcatgcttccgcctggagtttggttaactttacctgtgtcatgaagcgtagtagaaaaaacctaagaaatcttctgtccacaatgtggatgttagcattgcagtttcccaccacttacctagacagaaagaagaagagccagtaacacagggagccttcgtgcctcagtcttgagcacctgggtcatggctgggaaatgactctcttcctcctccttggtgttcattcagctgctcctctccctccttgcaggatcaatgcagccaacaaacccctcaatccctcttccaggagtcaacttatttggtgtgatcctctcaacctgcaagcctgaaaagtagacttggttcccaggtaattgtatgacatgagggataacatgtttggtagaactaaggatcaactaatgtcattacactgtcatcctctggtttctaggcttcaacccaactcaacctccaagtccaacctttaaatggaaggtccccatctactgaaacctgcataattgcagcgaggctccttgggaggttactctgtgcagtacagaatctcaatatgcatgttaggtctattgtggctataacatatgaaagatgaatataccagaacaatcaccaaagacctagaacacatcagttctccatttcagttagaactttgtgatcatcagatgagttcagaacatacacaggcactccacagccagaaagtacaatgagctttgtctttgctggagtctatggaaaccacacaagcctccatgttgtcaggttttgcacatctgtaaggtgatgccaaagggaagtagttatcctaattgcaaaggaatcggtggttggaaagggtcatgtctctccctccatgttgtttgaaggcgtggagctcagatcttttttcccttgttgcttaacctttaaaatcatgatttttttgtctccccatttatcattgtctaacctttgcaaccataatttgagacacagattgaaaagaacctctgtcaataaatcgttgttgtttggttggattttcttttccccgtggggatgaatgttttcttacatggtctgaagtcagatggttgactttacagaatccattttccaagtaagaaataggaacgaagcctagaagacaggcagaaggaagtgagataacccaaaaggtaattagctcatactcagggtcactatttctcctcaaaatgctgtgatccattccccaggactctggcaggcaggctgtgtcagccccacctacaggaagcaattgaggcgtggaaggcagcactgtcttctgccctgactcctccttttcctcaggaggccattggtacccaaacatctccctggatgtctgcctcatcaatgagcatttgccatggtgcagatacagcctgaaagttacatctgatgttcccggaaggacagaggaccacactaagaaagctttaagaggccagtcaatacattcaatcttctgcattttccaatggttacaccatgaagcaatggacagaaatccagcagccaatgacttccagctacaagccttgacaactcagttttgactttttctttaaattagtcactgttccataatgcaaatttatctggttctctcattcttcatttcaaaggaatttgaaacaaggccagtcacaaagacatagctatatttttcatattaagaaaattcccttcaatcactatagaaaaagcattcacattaaggaaatgatggagggtgggtcatactgagggctgagatggccatagacagggcaactagataaagtctttctaaatgatgattacagagcctacatccggcaggtgcgtgatctatctctgtgtttatttgacccaccaaatataattgttggggaaaatataaatgacaaattgaccttcagattaatagctactgtattggtaaagtacaaatcacttttaacagccacattactttagcaaagagaagcttgctaactgctctttaattaagtacatttaatgaccttaaggggattagtcgtcttgtctcacgatcaataagtgtgccaagatggctgcctcataaagtgaggcggaagaaccaagagaatctgaaagattagtcccccccccttcctacatttttcttccttttaattatttgattctagtcaacagtctggaacctggcaatcccagatgagaggaacatactggtaatcaattaattctgaatgcagaacaacaaacacagtgttcactatattgtccccaatcccagtgacaagtagtgtatctttcccagccaattgctgcttgaacaatgctgatctcagattctctgctgccccatttggtaagtgattggttaattaattataaataattgatgtactgtgggactccttttgtgcatttgtgaaattacataggaggtatcacaggtcactggctgtgtctacattttatattttacataggtaacagttttgtgtgtgtgtgtgtgtgtgtgtgtgtgtgtgtgtgtgtgtgtgtgtgtgtgtgtatgatctgtctgagtagccagatgcagaacaaacagtaaacttctggactagactccaccttcatttgcccctacatgctgagtaagaccaagtatagaaaccaaaaagaactaaatagaaaacagtggggcatctggtgcagtgggaatgagaatgaggaagtggtccaggtggcagatattagctatggggttgcaaacagtctgtggatggcagagcattagctatagcgctgcaaacactctattcagtagtgacctgaaggaacctgctcttctcttctgggcctcagcattctcaccaagtggaactgccatcaagcatcaccatggtcatataagagtcctaattctgcattgctgaaagcagatgcctgcttagtggctgtagtcgccattcccattcagttaactagagttcctatgtgacccagagacaacccgatcaacactgtataaggtaagcaagatgcagctagcatttattctagattggctttttctttgtttttgcattttttggggatttgtgcattttattttatttattgttagtgttttgcctgtatttatgtatgtacaccctctctctctctctctctctctatctctatctctctctctctctctctctctctgtgtgtgtgtgtgtgtgtgtgtgtgtgtgtgtgtgtgtgtgtgtgtgtgagtgtgtgtgtgcttcatgcccacagaggtcagaagctcttgaactttatttacccttggctgtgaaccaccatgtctcacagtatgttgctaccattatgctatcctgtgcttgtaggtagaggaaagatgaacaagacagcttttcatttgaagggagttgtagcttctagacctccctctcttctattcacgggtattcttgacatctgacaaacacagttttagcagtgtctccaatgcctatcactagagagcttgacataatgggggaagtcagggagaacatgggttggattgtcatcacttcccactcaggccctgataagaccttgggcaggcagatcctgtcacctctttaggtccccaatgtccatgaccatcaagaagaggggaccttgaaagaccaagagatcatgtgtgttaccagcatgatactcagtgtagaccagatactttaaaatgagtacctctaggctggggagatggctcagggttaaagcacttgttccggaaacatgaagaccagaactcagtttcccagaaatccgcatgaatgtcaggtgggcaaatgatctgcctgttatttcagccccagagcaggctagctaacacaactagccatttcagtgagctctgtgtctgaatgaaaactctgcctcggtgaaagatgaagggtgattccctgcactaccttaggccttcacatgaatacacccacccacccaacccccccacacacacactcacagcccatacatgtgcactcacctatctgcaaacatatcaaatggagaaaataaataaagtaagtacttttttcacacttaaaagcaaatgatttgcggtatctatgccaatcaatctgtgattaagtaatcaataggaagaaaagccccaaagccccaaaggcaagccgagaaggttcaaagaacaagacgcttggaacagagccttgaagagattagggaaacaggaaagagcaatggtgttttagaatgttccctagtggttctgctttggatatttaatcaggaaacagtcctacattgtcaacgttgaattactgcttaatttctgctttgcaatagtttgcatttctgtgtctcgatcacaagactgtcctcattgtcttcttcctggtgtgctgctcttatcctccacaagacactggaagctcctacaatgggagtcacctgagacaccttgggatggtggccctggttcgagcatgactgccacatgtgtctattacccacttcggaatcagatcagagatgccttctatcacagattacgaactggggcccaggtttgtgaaatactctacaaaaggcattctttgtatgtttttattgcctacaaaatgccaggggagtgtcctagtaagagtaatatggttaaagaaaatagtatataaaataaactcttactacctgcaaagcagctctactttcttttcttcccagcaaagcacatgactctgatccctggaagcacaagatatttacttcttagttgactatatctgaagcaagaaaatgttgtactccaaattttatagcaaatccatgatcacaaaatcaaaggaaagactttactaatttgacctggcccaatgttggtctaagttaggaggaaagcatcaaagtcagagaaagtgcttagcagaacaaaagagtcaagcccctgcccattaggcctcctgattcatatgccaggagtgtgtgtgtgtgtgtgtgtgtgtgtgtgtgtgtgtgtgtatgtgtatgtgaatgagtgtgagtatgtgtgtgtgtgattgtgagtatgtgtatgtgcatgtgtaaaaatgtagaagtgtgaatttgtgtgtatctgtgtgattacaagcatgtgtatgtgcatgtgtgtatgaaactattgtgtgtatgtgagagtgagtgtgtgtgtaagcaagtgagtgtgtagtgggagggtcttttcaccttcacaatgtagcagttgtcctcttttctcagtggggaaaatcctagagcctatttcctgggtcttgagcactaaatgaactaaaatatggggacttttaacagggcatttgacctaccagaagcaccacagaaatggtggatactatgctgaaattgccctttgtaagagacctgagttagagtattgtcgtatctcagaagataacagaaattaagaatggagcttgtgaagtggttcaacaggttaagaaactggctgctaagtctgaccaccttagtttatctctgaaccaacatggaagaaggatataaaattaagagttagataaagatgacacaggaagatgcccctacctttgggtagcaaagtaagagcgagtagaatttgagttctgcctcttcctttcacgtaacccctggtgggttatcaactgatgtgacagactgtcctgttcatctggtccttgccagccttgggaatacatattaatgcacattatgagaagattaaaatctctttctgatttaatatttttaaaatataaaaagaattttaaaaatctagtggtgttatactcaaagaccagttattagtttcaaaacaaagtgaaccaagaataacattccacacagagatggacctgcagtggcaaaatgaaagcttaataagaattaggcaaatggttccccttgttcctcttggttccctttgatccatcttcctttattagctccttccctcatcctcagagccaactgggtgatggataaaatgatggctaaaacacaggctttagacttgcatggatgaatataacagtctggcctgttattccgttgtcccgttctgcttgctttctgctcctcagccttgggaagcaaaccctgggtctccaatgtgctgagccagtgttgtcccactgactgcatcaccagctcttgacatctgagcaacatttctccatgtgtctctttctatcccctaaaatagagaaagtgacaggcccaacatggtccctttccctgttaattttatttttccaagacacaccattgccttctgtgatattcaatctttaccttacctatttttgataaagggcaaagaagtatggattttctgtgaaaaaccatttaattttaccaagttaccttgaagttcctatgccattttctaaagcaaatatgaagtaagtaatttgatcttggtccttttccattgggtaggtttgcagggggtatatagaaagctagaggatggcagaaatactttaaagtaaaatatttctaattttaaaagcaatacaaatgaatgtgagccctaagctaaagggaatgtgtatactaaaaagatgaagacgaattctccacctacagaaagcaatacagatgacaaggtaccaagctctgacctgggccaggaaatgctccatggacagaaatgatggatagagtctgagcaaggaagcactaaccagccttaaaaacattaatcgattaatattgccacagctgggtagaagcagagacctggcatttaggaaacatgaagatggtttgcattttattttataattcctatctgtgttttctatggaaacatctgatgagacaatggcagtgccaggctgggcaagcacactggagggtgttgatgtctctgggaattcagagaaccaatcagagaggcaaacacccatggcacccaagtggcttctgtgccatcaaacgtagcagcgcctttgggagatcacaaatgacctctaattgttatcattttgcacacatttgctggagagctttgtttaagttctcctgtaccaatttactccccatcccttccactctccagggagactaacagccggttagtcttggttcaacaacttttcacaccaagacgccttctccttcctacagcgcgtggggtagggctctcatttcccgctctccagctgcaagctcgtactcctctcttcacagtggatgtattcttgtttcattctctcaatgactatccttcctctaacccagaaccacacacatatagcgagcttgcctgtttctccacagccaggcaccaccaggcccagtattccccacacatttacttcctcagtcagtgtgagcaatacaggtatatgtaaggatgtgaaaacccaacaaaatccttgtatcacaagcttatttctcatgactggggcacaaggtaagcaaaatgtataagacacatagagaggcattgagggtgaagaatctcgtggcaaagggtaagaaaactagtgccagagactatgagagtcaagccactcctggggaagttccttagcatactgacagaagcaaaggcaaaaatgaatgctaagggcaagtgaatctaagtaaaccattcagaggagggctgggaatagaggaaaccttgggaaggaggatgtgcccaaataaaataaaatgcacatgtgtgtgaaaatgccatccttagacctgttggtttacacgctaactaaagaaatcaaaaaaactggaaacatggttgtaagaagctaaagagaatctctctctctctctctctctctctctctctctctctctctctctctctctctctctcacacacacacacacacacacacacacacacacggtcccagaagttatcttatgttgtaaactatgttattttagttttgattaattgaagtatcttgtaacacaggagattatattagatgatccttgttccagcttgctaccaccacaaatatatttaaagcacttatgccaaggtaaatggcacacagacaagagaagcctgcatgaagatgaacacaagagagacttgatggtactggccttggatgctggacactgtggtactggcctgtgatactgtggccacaggaccacgatgccctggtttccctcaatgatgggactgtgaactggaagtataagatgaaataagtacgttcctctccaagttgctgttagtcaagagtgtctgtcacagaaatgacaagcaaagaagaacataaacacagaagagaactgtctgaaaattgactggcaaagtcaaggccattcctgagtaaaataatgtgtgtatgtgtataaatgaacacagtgattctgtattttacatggtaatactaaaaccagaacacttaggtacagacaccaacaaagaggaatttctgtgttagccatccaccctttccctaaccaatgaagaggaattttttgtgttagccaatcccccttgccctaaatgctttagacagtaaataagaatgcttgattagggttgatacaagattggcaaaatgatcaaaagagcagaacaggggaccaagggatgatccacataaacaaagttggccctgtaatgctgtggagaaaggccagagaacaactagacaattggatgtggacagagcgagacaaaaacatacaagacacaacctccactggataccattcacaaactccccagaaatccctccaggttatctgatgaaagaaaggaggcgagcaaagcaactaactggtagaaagtcaggtgtggaggcattttctcagcctcaaagaagcgatgtgtttggtggaacccttaagtgctattatgaagaagaagggcagtaagtagagccacactaaagttcaaaactccttgatcccagataccattaagaaagtaaaatttcagcttggtgatttggagatcttacctgattgtaactgaatcatactcagattatactaaaagtatccatatataactaaactcagaccatgggaaatgagagaattggttaatctggacagaaactaagctacccaaatggctaataatgcctgacaaagcatgctcagcattactggtgttcagggaaatgaaatacctttaaaaatgaaataaatttaaaaaccaaaaatgatttttaaaatggaatatcactaaatagatttaaaaatgtaacattaagaattgtagtgaccatttcagtattaatggaggagtagttcggcataggcacttggaaaaatagttacgagcttatctattgaaatcaaacctatatataatcacagcattactatgctaccttcagaatatattaccagatgtgtgtacatccaggccaagagaaaataaatgtctatagaaatattatttatagtaatcatcacaacaaaactcaaatgttcaactgcagaggagcaaactactgctaaatggaacatgatcaatttatcaaaagtaatgttaaccaaaaaaggacagaaaatactatacaatactatacactgtgaattttcatttgtttaagtatgaaaagcagatggctttctgtgctgcttagcaatgtacacccacaaaaaaaaatgaattatattcacctttgttcctgctggagccacaggcacaatgtttgtgaagctaaccattgtcaggtgtgtagcttgctagatgcttccatgagtgttgacatcatgaatattcactaagaaaagcctattttacatactcttcaatgtttaaaagatattctaagggaacacaatttactgttaaatgattgataaatgttataaggataatgaacatatgtgattaataacatgtactccaaacactactatatcaacttacagagaccattataactaagaattataattaaagattctcatacatttctctcagaaacaccaagaaggaaaagcaactatgaacactgtaaataatattaataatatgttaatgatgaatacttcctctatcatgctttatttatttagttagttagttagtttatgtgcattggtattttgccatgggttttaggtcctctggaaccagaattacagacagttgtaagctgccaagtggatgctgggaatcgaacccaggtcctctggaggagcaatcagtgctcttaaccactgagccgtctctaagcctttcttctaccactcttaacaagtctgttctgagtataagtagaactttctcaaaagtcaactataactcagccatagaaagcttataccaaatgctatcattcaagtacatatggactacactctcagaaatgttcatggccatcagtgacaatacttgaaaatgtaatagcaaacatatacatttaactatatgtacagacatgccatgctactaaacacagtgattaatgagaaacgcactaaaggtgattatgggatacatacatatattttagtaagatcatcacacatcatatcgcatgaggtaacacactttaacatccattaaatgacatgaaatataaacgtgtaagcccttattgtgtgtttacttgatttctctctccttgtcccttctgtgtgtatgtgatgtgatgtagttttgcggctgagctcacagaatcacatacgtattctttaaggtgggattcagctctgtgactttttggacaatggaagctgaataaagaacgagagaagcagtggcttcctatctgacttgggaggtgttggtaactctagttactgagatgaaagtggcttcccagtgaatgctgcccccatggcaaggttctgggagccaggccgactgcacacagagcagggctgagtcaagcctgtcactccaaacatccccaaacatgtactcctattttacactttactggaactttgtagtaattacaaaatcaaaattagctgacagaaacatcgacacctagaaatgaagttgtagacagggtaaaacctgaactgtggtatcacattgggggcaaaggtagagaaaaactttgtagaaggttggggaaaatacctttcttacagactggaaaatagcaacctacctcaacatttgtagaccatctgagaaagtgtgccttaagtcacctagaaggaaaggggtaatctaataaacctatggacttagaaaagctggtttagagtcaaaatgccaatagcggggttcagctgttctagaatgcctataataaaacagacgtggattctacggggaagagggtagactcagagatggactggtaggtttccatgagaaattcaatattgttttcagaattgcaataacttggaacaaaggtttttggaatatatggaaagcataaaatctcctcaataagtataaatttgaaaaataaggcaaagtgtgggcataaatggaggatatgccaccagatactgaaactagagaggcttggaactaaaataaggcactagacagtaagacactgtccacagagcagactgaagactaagaaagagaactctttatacacagtgtcttgtatgatgcagatgccaccccacccactgctgggaaagatgagattgagaaattaattaaagtgttttatacatgaaaagtggattaaaggagacctacatgtaaaatccaaattataaacatcattctaagaaattgggggaaagggtctttagctctggaatcataaaggtgagaccaaaggacttgattttattcaagttaatcattcttaatcaacaaagacaaaggtcatggttactagacacatgacagacaggagatgacatttgtgaaaagtaaaactgacagggatcaatatctggaatagacaaagaactgtaaatgaacaataaaatgacaggggaccaaacagaaaaaatagcagagctaaaataggtaactcagagaaagaaatgattgaacaggtgttagggttatgggacacacagacacacaaaacagtgcaatcaatgaaacaaaatatgctggtatgttagttcagaacaaccctgtatcccaggaagatttctttagtgaaaataaatatacaaatagacattggtctggcaacctgcactgatttctggaaatatttcattggtctataaagaaaaacatccagaaatgtttatcatctgttgtttatggattaggagattgaaagccatcttatttttcattgtcaagagaataagtaatataagacattattttcagtggtttctgatggcacaccccctgctaaagaatggctatgccatacagatccgctggagagtgaagagtaagaaatagaatgaaatggtcaacagagggctatctctgtatattaaaagtcttatctattcatccctttctcatatacattgagacaaatagcaaagaggtaaaaatgaaacattgatgagatcttattcccaaacaaaatgaacagaaatgactcaatgctgtcttccacatctccaagataaggaaacacaggaattatccattattcaactcctaaagtctgtccgatgcatggaaactggttaaagcaattacgatcaagaattgaagactgaattcaaacttagctgagtcacacgttagcttcatgctcttacggaaattatgtaatgtcatggcttgaatatgcaatgaatccataagctcatgatttgaacatttagttttccagatggtatcactattttgggatgtttttggaatctggatggttgggaagggacacaggaattgggtcacagggaacaggtctttgtgggtatgctatccctagcctcttgtgtctctctccttctgctttctggtcacccacatagtgaccactgtcctctctcttgcacctccactgctgtgatatcctgcccaaacacagagccacacccccaaggaaagaaagctttcaaactgtgggacagaataaatctgccttcattaaatctgtcagattctctgtcaatgggacgaggaaatcactaacacacttaactcagtctcttttacttcatgtgagaaagggggattgataagacttcattaagttattgggagtgtttaaacttttaatacccccaaagaacttagcacaattccaccaccagtgtccatgattagcttctggacataactgcactgacatgccaaagcaactctgcctctgtagctcttcacaaccatctacccaagaagagtctcccacattcacctgctaccacctgggctctcagaaacccacagtgcccccattatgaaagggtttttatcctatgatcattagattattttggaatcttatttatcttctgctaggaagcagtttttaagaatgaagtgcaattttaatacattgagctttacattaggtacaaaatatttcttcccaccactaaatattttgaggatagcaattctttgagtgtgtatgtatcctcatttccctaatagagtagattcataagtggtcatgccatgcagctagttagtgacagggctgggatttgaatgtacactgaaagtctcagtttctcatgttatgtagtgtggtaaatactgtagataacttttcacagtttatgttcgcaccccagatcttgttacataaaacatgtcatgtaccaaaaatatcctgtgtaaaaaccactttatcacattatctgtttacttattacctagcccagaaattatcaatgactacataattatttctgcgaacaaagagaatatttttctgtacagatattaaaaataaatagctatagatttcttgatttgtaagagtgagtacacttgatacgtcaacactggactattcactttgctcagtggaagagaactatggccaaatagcagcctccgggattcaaaatacaatctcagagattattccaaaactaccatctttaggacagttgccttacagccatcctaggaatgttttgcttgccatgataggaaatctcaattcaggagaatcagcacaactcaagacctcatttccaaatttgctcttaagattttagtttcctctgttggatttttttaagataggaggcagtactttacttctcagaaaaactgtgaaagttgactggatgttcaggtttcaatggagtatgaatggcatccttttaggccactgtgtgccctaagtattcccttgcagtaacccttgccagagttggctgttattctctaaaattcagcctgccggatgttcaacacatggaaaacacaggcactcttacttttacaaacattaaataaagccattttatttctctttcctattttcttttccagtttctatatttgggggagggtgtaaaataaactctgattataatttggctgcatgctacagaattagtattataactataattagtattaggattataattagtatcataactcccctgttgcagagtcctcaatctaaggtgaacctagggcctctgaaaacattttccaagtaattccatttactctcagacacttcacaattctcagaagctatactgtaaaaggtagattataagctgagatctttcacctacctttgctctgtctacggccctcctgcttagagttgttcatccccattcccaacacacacacatttgatattaaatttaagaacacattctacttagaaggaagttcatctcacctgaaactctatggtacatggggacaaggaattattagcatttttaaaggatgtatagttgatgctacctattttattttctgattggcatttataacacagggagttctcagtcattggccacacactcagtaggcaaatctcttgtgtgggtgcagccattccaccccacccccaccccctggcaatagggtcacctatgtgatttttctgctaataaacagatttgaactagctaggatttctaaatttttcgactagttgtttatctgaaatatactccagaggaatcatcaggcagttcttccctggatttaatttaaacagtaacgggacaaacaaatctctatggaggatattcgacaataataaaatatttctctcagcgggtgagccagtagcaattgcattgttgtgatccaagctcacgttgtggtcggtcattaccatcataacaagcccctggaccaactggcatggacacgcaacattgagccccggataggcacattatttcagaacctgagcgtcctggagaacaagacaaatacccccggaaaaggagggttatattttgaaattcctttcttctccattttgtttcataataagatgcaattcacaatccatctctggctacttgctttggttttccacacaatgaaggggctggaaaagcaagaagctgccctgagcctggaatagagcggatgccctgacttgcatgcgttggtatcctacggaaatgtccactcagacgtgtgcactcttcactgcggaagaaccaacctttaaacaggccccacgtggctttcacacaccaatcacaaatgaagtttttaagtgagcaaggtgggttgccagcttctacacaactctaagaaggtacttctgccctcaattccatcttatttttatcctacacataaaccaacttggaaaacatgggtagaaaaaaagtagttccgtctaaagttcccccccaaaaaaacccttaaattttatttctccctccctccctcccttctctctctctctctctctctctctctctctctctctctctctctctctctctctctctctctctctctctctctctcatagagaaaagcattgttattacccacccccggaacatgtaaatgaatttagaagcaagttaaagggccaaataaagagattaaaattaaatgttcatgaaatactcatttaatcctggtaaatggctagatgtgcactgagttactaaataaaacgtgttcccttgggcctggagagatgtcttagtggttaagagcagtttctgttcttgcagagagaggatggggtttcagccagctcccagcgctcacttgggtctacacactagcaagtattaaccccaattctgtggaatctggcgctgtcttctggcccctttgggtctctgcatgcacgtgagcatacacagacacacagagactcacaaaattaaaaatgagacaatcttttccaaaatgttcccttgtgatttggggaggggcaataaaagccgcagtggaattggggtgaggatgactccccctgtctgacataaaccacttgtctttgtggaaacagtagtaagatgagatctttttgccttggatttcttgggtagttacaaacatgcagggccaatgcaagcaagctctatacttttaaaggcatttttgacttgagaaatattacaaagacacagcacggttccatccttggattcaggtgaaatcatctggagatttccaaatgtccgaaaacccaggccatgttgcagaagacagtgaaactgtacctgtgtgttgtcctttcgctgcagctgcgggcgatgacacaggaatcacaaactcaataaaacccacgtggagtttattggggacagggaacaaggggaggagggaggtgttggccaaccgggaacagagatggaacttgaaggagacggggaagtaggggaagaaggaggggaagtaaggggagcaggtgggaggtgctcgcttcaaaggggaagcttgcacatgcgtacagagtccttccgtgctgcatgaagaagccacacacacagggccctttgagctgtctaagtatctgcctgaatgctggtacgcacatcctgcccattgtcaggtggtggggtcagcataatgccttatactgtgtcctccctgcctggaacctgtgagtctcaagattccagcacttctgagaaagtttaaaacatggacacgagtttgagaagcatcgtttgttggttttctttttcttttaaactactgctgacggttgtaacaaaactgttgcccgctgacttctttaagataattggggtggggcatcaaagggcacatttatgagttatgattcactggtgagattaccatgcatcattgaagttgaatgttattttatggatttccttcctttggtatgtgttcatgaaggtttatgaaactcaacaacatgagttttcagctttttgtgccttaaagtattttaaatgcaacatttggttattgcttatttttccccctgaaggatgatgtattgttcattaaaataatctcagaggtaatgtatgttccttctaatatattaacatgagaaacaaataatttttgcaaactgttaaaaattaaatgattcctaagagtaagcaatatacaaatctaccttatttctaaactgacaaatgcacctaaaaatatcaaagtcccactcactttcttctatgcttgaaggaactatgataaatatctgtaccagaaaagttgtctcataattataggttatgaaaaagcaggagaatttaaatgcttgggtttcttaaagtactttaagtgtgcctcccatgtgttttaaaaagagaaactctcatgaagaatgcagacagggtatcccttcttaggtctgaatgctgggtttcagaaatttgatacaaataaaccaacaactcaagagtctaagagtatgaacatgagatgctatgtccggcctttggccactcaacaggtattcaaatcataaagggggactctgagctttcttgctggctaggcagtctcatggtcctagaagcaccagttctacttagtggcctttgtgtcaccattgtgtgtctctggagaaccagtcgcctctgaaaggtgggcgagcactgacaaaacactcttaggctgggcagagtgactacaggacaggctaggcaggggcagcaagaaagaacatattagctctggggtgatgactccaggagggtccagaggaagcttcaagttgaccccaagcatcaagggtaataaaaggtcatttgctgtcaacagtgctgtttaaccctcctgaattccaagactgcctcctcccctttcgtggatcccagggctctgccaagacttgccccagttcaggagagccggtcaggggctgtgctgtggattcctccaccaaaggcaggcgctggcagacctccatgtaccagtcagagatcttgatttaattgtcaatagaaggaaataatagatatctcacaggttttaatatgatcttaaaataggggaaagttttctgttatgacattgacatagaggcgatgattttgagtaatgcaggatgatgtggggctgcttaagattaaatccgagctatataaaggcctgtcagaatgaattctaatgtgccatgagacactttgcatacccttaaatatgcaaaatgtctcttggcaccctagaattcattctgacaagcctttatatagctcttacttaaagtcctactttatttttagggaccgggtcctcggagctactctttgagtgacggcaacaaagggcactgtggatccgtttgtttctttagtgaggcaaagaagaaacacaatacaaaagagcagcgaaaagtggaagcctgtttaatattgttctaccatcctcctgaaaggcataataatttgagttacatatctgaactgattggagtcacagaatcatagctcctttttgcatttaacaatatatacaatataaaataaatacatttacacaaatggacatttgctggagcacacggtatggtacacatcacaaaaatatacaattgattgctttacaggtgtgatgcccatctacagctatagacatggtttcattattattattattattaattattattattgttattatttttactactggctataatgcaactcctggatcattgtaagcagtttaaattttgtttttttgtccatttacgatctatgcacataagactgccataaaatgttgtcccaggcaggtaaacagggatgcttaaataattaaaatacaatcaccgacatccattttctcttctataagaaaaatagcagttttaaattttttatatcttttatgtcatcatttaaatgcaaaatagtggaataaatacaacaatctgatttgattaaacacgagtgtcgctacaaggagtcaacacagtcatattgctttaaataagaacaaacctaaaagaaaaagaaaaatgtaaatcgcacggctaaaacatacaccttggtgatttcctgacacttggcattaactaaatggtcttgcttgaaacttgaaaagaacaataaactttgctcgagcaaggtacaaatgggtatttgccctaaagcccgtgcatttcttttagatctacattttaagctgttttttcccccttagttatgagatatttgtcgtttttgaaaagccaagccttttaaattgaggacgacacattgtacctcattctttaaatgtgtctctgtctcgcgtgatcacttgcaggctttggcttctgcaggccaaacacttcagtgtgataacagcgaaacagcggataaactgtctacattccatttgtgtgtatatagcgccattgcgcagtagtaacttaaaccctgcataaaccttctggaaaataatgtctttaaacacttacatgatgaaagaatcttacagggtcagcacctttttatccccccaggagttgtattttctgttgattttatttttcagggatttgccaatttctttaaaacttatcacagctatcaatttcaagttattgaccatccgaatgaattgctaatgatgatttacctagagtcacactacagtcactttctctactgagaaccacaatctacgatatattcccatatagctaatgatagatacacagtattcctagcacggggctgatgcatcctcagcccaagctattttgcttaaagcacacaaagtagcaatagttttggaagcaagtccgcaccaaaaaggttttgcaacaacacagagcgagttaataacaacatctgagagatgatcaggtgaaagccatatatacagcgtttaaaaattagacttatctatatccttgaatattcaaagctttatgtctaagctatacattggtattctataataaaccattagagaaattatcccttgttttgaaaatattgttatgatttcgatgtgtgtctgatcgtaacgaatactggtttggagtttcaatctcagttattactggtaaggagtagaatatactactgtagtctcctgaggaaggtatacatccaatactgtctctaattctaccctgtgtctaaaagcacacaccacaagaatccaaacaccacgagaacaagacgacagtttctgaatgcaacgtaaagttccgaaaagcgtagcaaacatggaacattgaagctgaactattcttttgtttgttaggattacaactttaattacatctgtgtacatagaataagactgtccacagaatacagagagcagctactgacactagtccattggtaaaagcgctctatggaggttaactgtttcctggttagtcggcgactgtaggttccgggagggggcatctgatgtctttgttagattacacctggttacagttctgaaactgactgactttcacgctgtgaccatacagttggaaagcacatctattggcttagctcttggtaaaaacaaacaaagaaatgaaacgaaattgcaggttaattgaaacgatcattcctaagcgaatcgactcctccggattaggttttagaatttggtcaggcatctgctgtctttgatgattgggttgtttgaattctggcgttagccttattgcctctgaaatgatattggctcacagctccttctgagacagagtttgtaactgcgtacaggcagcatgtcattcctaaccacgagggcagctagaaatcttatggcgactgtccctcccggtggggaggtgtactggtgctaattctacggattgggatcccatatacagtgctcgtggatgtgatcgcttggcatcatggtaggtgtaatctaacccttggtgtcagtgaacatttaggcaaactggagctcatgtaagaaactgatgcttgggaccagactggcacacaacataaattgcatccgtggtaatatgcaccttcccttcaactattgcttgagtaagttaaatccccatattaataaatggctgaaaagtggtaaagctggtacaaaaaaatctccatttgtaagaagaaacaaaatgttttttattttaaaaatcttccttcagggttcacttgtccttcatttagtgttcaagtgttcaaagccagcgcgaagttgcggtatccttacccctctctagtattgcatgaatgaataaagcttaaacgattccctgaaaaagttacatagtagctaaactaaccaatacctggaagacttgacaaaagaattaaggaatcaaatggctgtaactgatctagatgagaaagcaaggagaagcagccgatgccgccgccgccgccgccgccgccgctgccgcttaagttgtctgatcggaaggctgctccgtggaatctaacactgcactaagtcgattcgtttgtgttgcactgtactttaggtacggtgctctctttgattccttactcactggggatgtcatggctcatgacaagttcactggcatccatattatggatctctgtcctttggcagggctggcttccatctctctccagttagagactgcgtttaagagttcagcagcagaggggaggaaaggaaaagacagggaaggacgagaaagggaagggatgcaggagttgaaagagatgtcccttgtagttagaggtattgaacatgtggagtgacgtgggtgagaaaaggaggcagcaagaggtcaaggcaagaaaagaagggtggggaaaggaaggaggaagaggaggaagaacaaaggaagggaggggaggagaaagggggacccttaataaaagaagcaacatgtaagaacaggaacaagggtgagtgggaggggcaggtcagaaggaatggtgggataaagatgaggaaacctagcaggaagaagtggtggaatccgcaggctgcatcgtactgttgctgctaaaataccagtgcagtctctgttgattgttaatgttgttcactaaactctaagattcttcgacatcactcttgggtttatcttcccttttcagcgtgcagggtgggggcccggggggcggggcttttagtcagaccttggcctccagcatctccagaaacagtttgtgcatggggactttgccttccagtttgatgttgtagaagtgctgcacggccttggtggatgtctgcctcagcagtggcagcgtcatcagcatcttgcctgcacggcgagggtcctccatgtgctggccagcctcgtaatcctgcagggcctcatgtaagacatcctgaagtttctgaacggcttccacatcctctatgtgcatggaatctggacgatgaaacagaatgtgtcagcggtcacatgaacagtgaaatcaaagacactgcagcttactacacacacgcacacacacacacacacacacacacacacacacacacacacacacacacacacatacacacacaaaacaccataaagcaacatcacaagcaacacagatgaacacattctcaagaaaaagacgtgtggtcttggtcatcccaaggtcaaggtgacctcagaagtcttatttctaacatctgtatggccttccctggatttcgcttagtaatcctcgggatgagcttagaagacaggaatatgtagacatagacacatatttacagcatatactacatattggatagcagaacactttaatagattattacctgggcagctgacctctatgcctttctcaaatgttcatttaacaaagaattatagcttattataaggagcatagaacgccattaggcgagtaagggggaaggggagaatttgggaagagatggagaaaggaatgaataatcaaaatatattacaagaaattctcaatgaataaatgaaaatattattttaaaaatgtccaaatgttagctgaggtaaagtttaaatcccaagtcctcccacaaaagttcagattgccagttagaaaacaagttaatgactaaggacataagtaacatctccacatagcacatagaaacctcacgctatagtggcatcctaatagcatcttaattctttcaagattttaaatttattcctgacaccaaagtttccctatatactcaatttcaccaccttaatagagttttccacccttgagttgtgaaatattttgcacatttgtaatagtgaactctgcccataagttgactaacaatctaattccaccaggaacaaaaaagggttaacaaggttgctgcaattatccttgtgaaaaatgtggaatgtggataaaaaaaaattaaacagacacttaattatatacaagtttgaatcatttagcacattttattgattccgatgacagtttatctgttaattacacataatggagtctttagggactcttcatgtttaataatcccttttctctgtgaatgttgagtatgaagatgtatgtagctagcccaaaatttcacacaactcaaacaatgatcacaggctaaatagaaccttgtaataggaccaaacgacaacaaacagggaaggaattaagacaaatggatatcaccagaaaaatgcggttaaaatgcttccatttgtttaaaatattttgtttagttttcttgtacagggctatataaaatcattttaccaagtcacttgtaaattagccattatctatattaagaagataatgactatggtgtctttacttctgggtataaaatgatgccatcttggagctcagattaacttggtgttaaccttggctattattgaggtaaccccacacatgtgctttctcaggctcaaacttagtttgctctgtttgtgtgtaaatgtgtgtgtttttcaagccggagtacataagtgtacctgtatgtgcatttgggtgaccttcttcaggaattatccactgtgctgtctgagatagggtctcttactggcatggaattgctgagtcagctagactggctggccagtgagcctctgtagtcttcccatctctgcttccccagcactgggacggtgagctcctgcatcctatctagctttttggcatggcttcatgtacttcaaacactggtcctcaagctggcatggaaagcatttcactaactccctagtttcataaacttggatttcttttaatcaaattcagcttctggaatgtcaacagtgaagacagagtgcatttttgcaatgaatgaaacagaactgccctgtgaactcatgtccctgtgtcttctgtcgttatcagtaacatcctttacagtcctagcaatgacatctccgattgtatgaagactgccactttacatgggtcgggacaaattagtagaaatgtagacactgatagaaatacagaatgcatatagaaatatagtcattgattagaaatacagaatgaaacagacatttcattcccagtctgtctccaaactccttcctttggttagggtaatgattactagaatacgctggaatgtatttctcttttctgcctttaaacatgggaagccagctccaaccctcccctcagctttgcctttgccgctactctggcctggcccagggagatatacgagcggatgtcacaggaaatgaggcgagaacaaatagcagagcgatatgctcacaaacagcaattaagacttcaaactattctttaaaggccatgatttagctggagagatttaaaaatgatttaatcaaattactatgataatttgacttcccatttacagaaaagattctaactcattttagctttactcattctcagatctgctcgttctttaaatgcaaactcactaaatctgaactatttaattagaccctgattcagctggcagactgctgaaagaaatattcatctccattaggggccctagttcaagtgctggttctctaactttcatctgctctcttcactgggctgggctgacacacagatgccaggtgcggcggaagtgtcgttcactcattgttgtgctttggctgtgggtactggtttgttttcaagtacattcccaaggcaatgggtgccagaatcagaatgaatgaaacaaggtaaatgtagggacagcggtcatcagcgcatcaacaaacctgacgcggtgaagcttgccaggagtgccagattggctgggagggaatacccgaacccaagtcctgaaccaccacattgaagcaatgctgctgagctgggcaggggtggcgcacaccttcagtcccagcactcaagaggcagggcaggaggagctctgtgagttcaaggtcagcatggtctacagagtgagtgccaggacaaataagacaacaaagagaaaccctgcctcgaaaaaccaaagaaagaaaggaaggaaggaaggaaggaaggaaggaaggaaggaaggaaggaaggaaggaaggaagatgggaggaaagaaagaaagaaagaaaaagggaggagggaaagaaagaaagaaaaagaaagaaagaaagaaagaaagaaagaaagaaagaaagaaagaaagacagaaagtactagtgggctagatccacaactttccactaaattttgattcaggactactgaataagatatatatatattatatatatatatatatatatatatatatgtgtgtgtgtgtgtgtgtgtgtgtgtgtgtgtgtgtgtgtgtgtatttgtatatgctattaaaaaagttaaactttcaaagttcaaataagacatatactgttacttatatggtattttaacccttaataattaataattagccacatagaatgtttttattatgtattaaatgtatttatttaatgtatgtgggtgttgggcctgatgtgtaccatttgttcgcagtgcctacaggggccagaagtggctattgtattccctgagagtcaagttatagacaattgtgaactgctatctaggtgctgagttttggacccaggtcctttggtggacagtcagtgctcttaatcaccaagccacctctccagttccatttctcaatttttaatagcttcccctgtgaatgggaccttaagggaaggtgtcatccccactctttgagaacagggatagattcatccacttctgtagttgaagcactcaacgtctcttccagccatcaccaaatacttttattgattacctagagcaaagcattgacttcctgcttgtagctcattctcaatgatgatctctcagtccccagacttgactctgagctagaactgagtatcagaagtatgtaagtatactcagtggtaagtctagactgtagcgtgaaccagcatgaaccagcatgccctgtaatccattgtgtgtagcagaactggtcactcttttgggtgtttataaattgccaacacagactacttaatcttaaaagagaacttatgtttcaaaatttctaggcacactagctaaggtcttctagaatgacccatggtcagcaatcacctgttgtccaggaaccctgattaacaactgtatgacaaatgggctcttgattgacaagatggatacccccccaaaaaaaattaaaagaatgaaaagcactgatcataagtcttagttatagcatagtaactggacagcaaagtcaaatcaagtaacattttaacacaagtcagtgacaatgttgtctccaagatcctggtgaaacacatacaattagatttacatgtaggtgtccctaacagttccccaggttgacatctattcctggcctctggtttaaaatgggtatagaacaccttgtcagaccaaatggcatgaatttcatctaaaaccaccaactcattgaagaacattctataaattgaccactgactaaattggaacaatccttagcttcagtaaagctaatatttgcaactgattggtatccactaaatatgcatgaatacctatatttataatgacattttaaaaggatacttttttaattttgaaaactggaaaacaaagagattgaatcaagtatttcttctgcttttatctataaactatattcctagtcactaaagagaaatgagagaaaaacagaacacatattcctatacatcactgctgaatgaaaaacaagagttgaggccacagtcaatactctgaaatctccagtgatgtatggattggagtcatcggcatcctcagccatgacaccacaaaccggccgctgggcattgcatggtgccgcagggcaaggacctgagcgtgatggtcacaaactgcaaaggacagagaaacaattaagagcttgtagcatcaaggctgtggggactctgcagggcagatgttctcatttctacaacagactgaagaaaatggaaaggaaaggggaacatttagactacggttgtacatttggattaaaaaacccatccacgagattttttagataaatgagctattctcagctgcagtcactaagcataaacaatctaataacaaacataaggaagtggtaacaataaaagccaggatagcatggggttactctttaagatagagttaactttctccctgcatctccatctgctacattcataggatccagtgcatctatttgaatcaataggtttatatttagcacctcattttctaaaagcagttactctggaggacagggagagggttcgggctggaacaagacatctggaagggttcctgggtactttgcagtcttattttttgaccttgctcatatattcattgtgtcacactgaaaattggttccaaggatgtccaagtgctgtgtcctagaacccataaatgtcacctcatagggcaaaaggaactttgcatgtgactaagatagaaccttccttcatatgggagattgtcttgaaatattcacaccaataacatcaaagtagagagaaatcagcaatgtcatgaagtttaacttctgcatcactggcttttatgatggaggaagagcctggcagggcaggcgtgtctgtattcagagagacagggatcaggagttcaaggctagtctcaactacctagtaggacactttctcaagaatataagataaaatgaaaagaaagatgaatgagtggatggacagatctatgcagatgttataagttatggaacatgaccaatactagagaagtcaaggaaaggaactcttctctagggctcccagagggggctgacctctgtccatatctttgtagtacacttgatgaaactgattttagaattctgatgcctagagaaaagagcacaaacattttttttttaaataaagatacaaattatgtcattattctctataatacatcaaccatttaactgaatttacctggcaccacatattataaataatctagaaataagttgctaaaacaagcaagtctaggttatataaaaacattatggcattttacataaggaacttgtacctattcaggttttgtagttgtgcttaaggaaagaaaatatctagaattccttcctcacagacatccaagtaaaactgtgctacaattatcaaaagacaggaaaataaaaaagtaggcatgacttctaaagtaaagccatcagtttaggtttctgaaggtgaaattggaatttcccaggtcttctgtacttgggcatctcaaacacagtgcatggtcatttgtaggttaaaaaacaatagattgagagcaacaacaacgtccaactttctgtcttacagtgactacaagtcttcatcagtttaccgcaggtaaatgtgtctcctccatcgggtatcttgagatttccctcaagagaagttttaaaaaagagatggctacagtaaggttctccaaaataaataaatagataaatgtatcgagtatgtatgtatgtatgtatgcatgtatgtatgtatgtatataacttcttgaccagtaactaactaaagccatctctagaacatcagagaaatggaggaaaattctagaattatccaagaaccaagtatcttctgtagattgaaaaggattttgttagtgacatctattctcatcgtttagctctatgtagattccatatttctatcttgaagtttaataatacagtctctgtcaatgtcccccataccaaaaaaaaaaaagaaagaaaaaagaaaaagtcatcacctttaatatctagtttccaatatttgtgtcacttagtgacactgtttagttcacctagattgctttatggttcagggtctctctcctctgagattgaggaacccagagtaaaagagggaggaaagattgcagaagtccatgggaatggaggaccctaggagaacatagcctactgaatcagctaagcagggctcaaacgggctcacagactgaaaaggcaagcatgagcccttcccgggtctacatgaggtcctctgcatataggttgtggttgtgagtttggtgtttttgtgggactcctaatggtgggagctagtatatctctgactctttgcctgctcttgggactcgtttcctcctattgggttgcttcgcccagccttacgaagagaccatttgccttgtcttattgtatattgttttgtcctgttttacaattgtctcttggaggcctgctcttttctgaagaggaaatggaggtggagtgtatctgggggagagaggaggcgggaagtattgaggagaggaggcagggaaaattatggttgagttgggatgtattgtatgagaagaatctatttttttaaaaaaattaaaaaaagaaagaaactattcacatgtctaaaccttgttctctgaaatagaggaaatgcaggcttacagagtagaaaacaattccccttagacaaaacattcacaaatatgtgctacataaacaattacatatttgtagtattgctatttaattagcaagttaaaaggaaaatcttatcaaaaatttcccctgagaggatgataataaaaatgattaagagatactaagacaaacttccatgagggttcaaatatgctaattaaatacagccccaccctgtcccaaccacctaaagaagtcatagcattctgtcactagacattcattctacaattgtgcatacaaatcaatttgtcctgaggtatgacctcagctgccaggtccccaaaaattactctagcctttaagctgaaaatcaaaatagtatttatactattctatcagtaggtatttattctagaagtattatatggcagtaaaaaaaaagcattaattttattcatatctattcttgaatgaaatgagctcactggaaggcaggacagcccttatcaggaatccaactgtctgcttgccaagcagaagcacaatatttacgattagcaaatgaaagcagatgtttaaaataagacaagacagataactgagatatctgttaacatctgcagccgttcagaaaaaggtcacataggtctctactaaataatattaatttctatgtaagaattcactcatgttaatctaaaattcttgaatgctaaaagaaaaacagggcattttctagcacatttatgtgtctatgcaaagcatcagcatacgctcacaggatgtgtgctcacacacatgagctcacagggatgtgctcacacacatgagctcacagggatgtgtgctcacacacatgagctcacagggatgtgctcacacacatgagctcacagggatgtgtgctcacacacatgtgcccacagggatgtgctcacacacaagagctcacagggatgtgctcacacacatgtgcccacagggatgtgtgcacacagatgctctcagggatgtgctcacacacatgtgcccacagggatgttctcacacacatgtgcccacagggatgtgtgtacacagatgctcacagggatgtgctcacacacatgtgcccacagggatgtgtgcacacagatgcgcccacaggatgtgtgcacagataagctcacagggatatgctcagacagatgcactcacacagttgagctcacaggaatatgctcacagatgtgctcacacagatgttcccataagcatttaagaaactcacattggatctaaacaagactaaatctataagttatggcaaattatgggcaaaaacaaatggaacaaaataaccttatattcaaagtatcaaagaaaatgacctttgagtgggtccccccaaactaaaaggctaggattctgaactggatgcaattaatttttcttggtatcagaaagctaaacagacattagagtcagctgatgcagaaacactcttcgaagccatgctattcagtaactagctactagtaactaggtgaggtaggaagcctcttaacaactcctaggtttaatgggtacattaaatgaggacttgtagccatgtgtgactacagccatgcagtttccttcctagcctggcagcagaaggactgggttgggacatccatgttgtaacaatatcaatgattaaacatttagtaaggaactgagggggtctaaattagaatacttagccataaattaagcctagaacatctccaattgccaactttcagcgattttgatgacaaagtttttagcattgctcagggtttataattaaccaacaatttacaaaaatcaattggaagcataaaaagatataaaatgtgcttcctccatttaaaaaaaaaacaatgaactgcctaaatggtttcagttggaattctttttatgatcatcaagtaaaaatctgttgcaaaaccatcactgtgaaatcttgcattcaatttggagtgatgctataaggtggagactaagcaaactaccaaattcttagaaaccttctatctcatatcccactggaccctctgaagagcaaggcaagggtgtctcgtgagtttgtaaacaaacaaggtcatttgccacaagaaatcatattttaagtttcacaggagagggaggggaagaggggtgaacggtgttgtaaggagtgggttatattcacaattaaaactgtgagatgccaacgcccattatgaagacaaataggaaggtacaacttcattgttgaaaacaatttcccttctatcagtccaaggattcatgcatcaatattgtagatgaactgttaattacaaaatcaattaaaaattatttctaaaaacagtcacgcatccctggctctcgtgggggcaatttgggcagaagatctcatcttgcccacacccgagccagatcacaaagtcgtcatccacaagtaagcaaaagcaatctggtttttcatttttcagcgcggctaagcccagcctgagattgatcgtcacatatggccccagaaaacaaactgtcaataccttgaatactgcagaatttgaacaaatagccatccgcccattcaagccactcactgcatcccatttaacagattttattgacagtttccttcttgtaattaaagggaaagctactggccagcaaccaagataaagttcaaagacagggtcaaaacaaaagctgttggaaagagcacggtgtgactgtcaatggtacagggcttgagagctgttattgacaggcaggtatctgaagacccgcccatcattaggagggatctagcctgaactttatgcaaatgttaaaagagacaatctagtatctgggaaggcacaaagggaaaacaacagagtaccaatgcttttcactcaccagagtttgccccaatcttagtacactactgctcaaaagcaaggcatgcctatgcctatcattcttaacccttactgcaggtgacactttcaacagaattccatgtttagagaattccagactataagccacagagtgacctttcataacaaaaccaagaggccacatggcatagatttttctcaactgcaaaattggcctttttgagaggaaggtggggagtgtttctccgtaactcaccgacattgactcactcagaaacaacaatgaagctaattttgtcccaagagtgcccatttgtgtaagtccctcaagaccttccgctttgctctgctccaaattagtaaatgcaaggggtggtaaaagtgtcacagcttatgagaagaagtgaaataaaaaccgctccctctaagtttatttttctttctaacttttcactagaaagctgtgctgattataattttgctgactcatggagactttacaaactaggcctcacaaatccccaagaagagacagaaagggggaaagtaacatcgataacaatgcaacaatgaccacatccatatgccaacctgaattagcaagagctatcgctttgagggtgacgaattcttccttctccagcttcatgctcttgtatttcttcaccagttgcaagatagcattatttaggtcaagaaggcctgctaatttggactggtcttcatccattatataatcgtctgcatagacaagttcatcctcaaacgaaagggatcggtacacaaccccgaggatcaagatttccatccatgcgctctggagaaggctcatctgatccgccagagacagtgtggagaagcctgcgtgggaaaaatgggtggatcaagttactctaaagccacaatttcataatgcaacctgagcttcctagggtgggcaacctctgtctcagggctcaaacatatgctgggctctgatcagaagctattaactcccctaccccagcatcactctgtaaacccaaagtccaagtcccaagccagcttcaattggttggtgctatggtagaatcacaaacccagccagggaaacataatagagggatgattgtctttcctttatttgcagagaaagcaccacgtcacctctctgatctattcccaacattaaaggaggtaagattttcagttaccttcaactacctagttgttaagaactaatatggatgaggaagatgaaggcaaaaatacccccccacacacacatatcatggaagaaagcaattaaaactgcataacagtcaacatcttgaaagtttatctctgtagcatccatgcagtgaattaaagccaactcagtattttcaactggctacttctcccatcagacatcagttcggattcctcttttcaacactagccagtatataaagaaaggagaaatcttagtttaccagcctccttgataaagaaaaatctacaattcattcttattattaaagtctgtttgtttaaaaaaatctaaatatagaaatgaaattgtctagtgggaagaccaggcagaaagccagagcccaaatgtaaatattgactagactcaggcactggctcagccattcagctcatacaggacaatgaacttgtttttgcatttgggaaatttaaaaagggcaagtcttctagctgctaacttacaacatgcagttgggaagctttgtgttttaattttcacctgaaataatagctggcttgatccttcactgaaattttagaaagcatccatagaggctatggaaactctcttctacacttgagtaccaaaaaccaaattgctgtgaaataaaaatattgttcaacacagaaagaggaagtaagacaactcaatctactcaatctactcattaggtctaagtagatgtatgtgtgtacgtgttatatgatgtacttgaatcttatataatattgttatatataacactattctgtataatatattattatataacatacttgttgtgtccatgacaataactgataaccggttgactgttcccaagagacctaaaaaataggtatttcctcgacaacaatatgacccagaattccaagcccatattccccagcccatggttactgagtacaccctaccatgatttaaagccttcctagcagtaatcctatagaaagaagggagatcattgtaactaatgcaacttaagaaatctctttttatgcccttcctagatagtaaggtccaatcatcattatccatcattatccaggcttctgcttgccattagttggtcccatttttattcatgtggaatcatttctgtcccacatgacaataaagaagaggagaagttttcctgacccactgagaaaaccagtgggctgctcttggtaccatgtgtgctcaataaaatcatcagaaggattacttctgcttcttttggtgggatccctgtagcatttcttttattataaaggcacttacatggtatttgacagggctgttaggtctttatattttaatcagtgaaatttggtattacattaataaatacatcctgacagcattttaaagaagtcaaccgtcacctgggaaaataattatcaaagaaaactaagttctacaaaagacaaacaaaactctttgttctctctaccccaccacccatcccacactgactgactgagaaagaaagactaaggggtttcttttacaaattcaatcatcatcaacaacaccaaaagtcatcactgggaaacttctaaaccagaagaaacagacttttttttttaattttcctggtttaattcttccttttcacaatcctaaacagtggtttgctgcggcagcagatggagagaccgtgtagcccggagcagcgtccagaggcagccccaccctccctcagagaccctgctgttagtaaatagatttacacattctccaatctccacacatctttctgccgaataattaaaagcaggatgattagtttattgagtggaaggaggaacttttttattgaggtccatccgtgattttatcagggccagcacttttacggttgtcactggggtgcagccatccaatttttcttatctgcctgattaatacaaacgctgtttcaggacacattaattaacagatacaaatctacgttctcatggaaggatcaatacggagaagaaaagaggcatcaatgtgaatttagtgctgatgatggagaaggcgctctatcgacatttacgtgtgcggaaacttgaaagttgcatggggcccctttgtccctgtgatttacaaattaacattttttcaacaacaacaatgtctgccatatttctttggggtttaattaagcaaaagcaataaaatatcatttttaaaggttgattccgcaatttgtcccctttgcattgatgattctgtgtaggcgtctgtgctcatctattttgcaaaccaaactcttgcccttttattttactctgaaataacaaaaaagagaggaaaagaaaaggtgccatttttttaacacaaagctctgacaactttgcttgtttgatgtcctgaaatatttttgctcactttgttaaagcagtgtgatttttacaaaagcatcagaagaaaacaaaaaacaaaagcaaaaaaaccccaacccacattgtaaaggctgaggcagtcagtcctgtcccccccccccctgtctcttgtcttgaaaaccaccagtgtctcacagtttgtccctttgcaaattcaccttgcaatctagaaactggaataaagtttccacaccgaaaccatggggtagcacttagaagtcctacaaaacaatcatgtatcccaggcctacaggggcccagtatgcaatagagacttgatttccattccataaaatatttatttattaatcatttatttatttatttggcatggtccagtctgaccttgaacttgctacatagctcatgctggcctccctctgaggatcatcccccagcttctgtccacctattgctaggataactgacatgagtcaccacgtctggcttttagaaatatcctttcaccctgccttgaggatggctggcttcgttttccttctacaaagacacatggatgaaaaaatatctttatcaagagatgtaagtgaagcacagacacctaaataatgagcctaaatggaaatgctgcagtaatgaagctgactctaaggggtttgttgttgttgttgttgtttgtttttaaacatgattgtgttatgggctcacagatcctgtatccgaatgatgacttgttcgtgttctcactaggcatttggtggtattttatagctaccaggctacaaagtagagtccctgtcacctataacatgtagctttcgctggcgagatacctttctcccaagcgaaatgaaatgcggtttgccactgtgtcccttgaagctcatgtgctgttcaaccccggatcctactctttggcatgtggcaggttatagtttccaatgtgcatccctcttacagctttttagaatacaccacagcacatttttctcctccccagctgcagccccttccactgatcccactgacatgtctgatctctctccatctctgactgccctggagttggtgccgcttactgtatctcgggcattttgctcagtggaagggttctctctctaccctgacctgcagctaaatggtgtgtttatccacactacagtgtactccaaacccaccagatgacagtggagaacgtcacttggaaaggctgaaagcctctcaaaaggcggctgcccctgaggtagcaggcttgaagaaagcctgctttgtgccaacattcttgcccatttctgctggaaacttcaggggttgacagtgctgccacaggcactcgtcggggacatttttttttccagcctggcaaactgatgcactttgtaatcaatgtacaaaaaggctaagcatttgaaagtgtgaagggcaaaaaatatctgacggctagtcttcaaaaatacactttcatttcagaaagcataaatgtttatttcctgaatggagtgttgacagaaataggctgccgtgcaggcatttggttttaacccctgctaggcatttccctgtcagctgcttagcttagaacagaaagccaacgtttcaatcctcgggatatttgttagtatcagttaatcatgacattgatttgcctgtttatgggttttgaactgtactttctctactccacaaaaaaaataaataaaagtaattgactttttttttatttcaacaaacagcatattaggctgcagttattattggactacagtgactccctgagatggcaaagttggaactgtagcacagttctctcgctcctgcacaagtaaagctgacatttacaggaactgtggaagagtgatggtaccactaaagttaaggctcagtcttagctatcactagatgctcagttacagggccctgtgtagacacaagtctgtgtgctgttcagccggttgctttttgcacacattgatagacattatcacttgttcaatcagtcacaaaatgcacagatctgggtcttagtggagtgtgtgtgtgtgtgtgtgtgtgtgtgtgtgtgtgtgtgtgtccatacatgtatatgtatgtggggatacatacatgtggaggccagaggtgtttgtagtgccttccttagttgttctcacttttatttttttacacatggtattttaatgaacctggatctcaccagctgggtttgattggctgtccaatgagccccaggtagccctcccctctctgccttcctgatgatgggattacatgttcacacaactatatcagacatttcacatgggctctagggatccaacccaggacttcatgccgtgtagcaagtgcttcactgactgaaccatcgcccagccaacagtggacagaataccaacaacagccagcctgccttgagcgtggacctgccatggatcaggccaagctgtagtaagaagggcgaggatttctctatgaatctcataacgtttctttggaactccttcctttccctaaacacttctggatggccagaccatagcttagacaagctcatagtcagcagttctccacctgcaggtctccacccctttcaaggttgcatatcagataccctgaatatcagatattcacaatatgattcataacagtagtgaaattacagttgtgaggtagcaatgaaatgcttttatggctgggggtcaccacaacatgacaaactgaattaaagggtcacgcattaggaaggttgaaaaccatggccttagactttcacaagcctgtacctggttgtaactttatttctcctgtctctgaaactaaacaaagaataaaacaattcttagagatcgtgagtcaaatatgtagtaaacttcctttaagacagggagaggctagctactttctttttcttgtactgcaatctttatttctcacctgtccccaaacaagggagttctgactaggaagctcatcttttgactgtgacagacttgtgagatattcaaaagcaaaggacagaagcaacctgtacacaggactaacataactcataaaacagcattgctgtcagctgggaactagatggtggagtgtagaagaggataaaagaggcttgtctactaacagtgtctccaagatctagacaactgacgatggccaacagtatttagccggccctccttccactttgaacagttttcagactcaacggagcagcaaacgttacacctaggagtcacaaagctactggggttcagtatggaagacatagttcagagcactggggacagagggacctggggtccagggacacatctagcaccttggcactgatgagacacaggaacaagtcagacctctctcccctagccctcatgtgcaacaggagacgaccctgaaatcttgctatggcaaaccctgtatcactatgtttctgaaggttttattataaggaaattcatgcccatcgacccttggggcacctacataggcactgtagtatgctctgtattttagagtataggaaatgaatgggctacggcccttatctcctaacacttcacagttaggtgaaagtggattggagcacaatgcagaaaagaccataaatgctgtaaggatgagcaaatatgcaggaatgcagaagagggaagcctagggctggttgtccacattctctctatcctccaggcccccaaccccaatttttgttgagacctccactctctcttttgattccaattctataattgtatccatagctatttaagcatctttcaaagacaacgtataaatatgccttcctctgactaaaaacaatgctttcttgggggtcgggggtggtagtgggttcaccgggagtgggaaggaggtacgagggatagcatcagggaggtgagtgtgggcaaagtaggatgatatatggaaaggtcataaaggaagccattattctgtgtgcttacaaaaagataataaaatataaataataatgacctttaaaaatgttcccttagcttgcagaattccagcaggccaaaacttgaattttctggtaaacactgaatttcttccaccatctggcttcctttccccttcccatcttacttcctaaaaatgactgtcttccctgatagtgatgatgatggcagctaccacactaagcaagaaagaggatgaggaagaaggaggaagaagaggaggacaagaaggaatggtcattgttaaatacaggacactaggtttcagagatgatcccttctttttgaaaacaacacagagaaagcagcctgacgatgcgtatctggcacttgcctcccggtctatgttgcaactccgggctgctcagtgcaagtgctcacccattcacatggatttgccacagtgcaggagccactgaagaagagcacgagtgaagtaagcagccttcccattgtaaagcagagaatcagacatctgcaaacagcaaggaggtcacttctgccctgttctatccaccacatcagaacaaggtgctaatgtaatttaaatgacattcatacaggtttcacgctattaaaaacagggaatatatccttcctttgacaataaatttgagagactgaggaaatggttgggtgggtgggtaagaatggttgttgtgaaagtgtgaagacgtgagtttgtacactcaacatgaacataatagctgggcatgctgttgtgtgctcctgtaaccctagcactggtgagtgcagagataggaggcttgctgaggcttgctggccaactggttgaaaaagaggaagctgaaagccttgtttattcccactgtttctaactccaaaataaactttaaattaatatatgtacataatttaatgtgcttctcttttccctataagtcaagttgagtaagaatttcaacagagacctgttttacttagaaccaacaaatactgagtggaaatctgaaccttagccctggcagctttgcttctgttatgtgtgcccaaatgatgttctcatatcaagaatctaaaagcatgtttgacacactggctaagttatacaggattaaggagacagggttatatatttgattacttggatgttgcaaaagagaaaactggaaggagaaggaaagtttacaacacaattccttcagcctctgtctgcttggggttaaacattaactaaggagcccatgagaggccatcgttctgctgactaatgacatatgtggagctcactgaacaccatggcgtcttgttaaataagtccctttgtcatagttctcctgtggctgaaagccacacatcttcatagatgccatggagtgatggaggaattaggggagccgggggcatttctttcacatgagtgcaactccaaacttgaaaattggtatccagctaccactcataaattaaaaaaaaataataaaaaaatagtatgtataccttcactgaaatgagcaagagttgggatctctgagagaaactcacacataactcctacattgtttttaaataaaatagcttccgatattttcagatgtacctaatcccctccttgcttcggagacacaaacccagtgtgggccctaatcactgagagctgatgctcgtctcttagtgtgtgcatcctcctcctaatcattttgattattacatggaaagcccttcaagtgttcccttcattttcctaaaacagacattgttgaccaagaaggaaagagagaacaaaactaaaacaggaggtcctgcgcataagctagaggacggcagcgcgggccactaagaacaaagtgtcacaggcattcgtgcaaatatgtaagaggaagcaagttgtctgcaagcctcatgtcacaggcatgaaattacagcatgatgacataaagctccacatttaaatactacgaaagattgtcctcacagatcctgaaagatctggccgtactttgtactctggacatcctggggggaaaaggctttctgtatttctgcctctgagggtccactttggagtctggctgtggcaggatcgcctctgtgactaatggagatctgttcacgaatatttactcccaagttcatggccagtggtgctggcagagacacagctaagtggttatggcttggcataggttccagggggaggctaccagctatcttctcactgacaataggagcaaccccttcaattcctccatggccctccctttgatgtcctcagtttggataactggctgaatgaagaggaagcaaaataaaaaccaggagacagcccagctcctgagagtccttggcatcagagggtggcaattccttggcaatgaaggtctgcttgccatacttcacctggatgtgtggggttcattaattctcagagaaactctcccattcaaaaaacaggctgcagcatgcagaccccagcacaaacaaacagcagcaacctttccctctttaagtggacaagagcccctaatctcctgcccccagcctccctgatttagtctgctggaaaatgattttatccatgaagctcaaatctgtcctctgcagtccctttcagccccctgagatcctgtcaataacccccaagaattccaacacaaggttgactcaagaaaaatacaggggacagggaccacactctgggttgccgcacacacatgaatctattaggaacttgtatcatcttctaacttgatttgagtggcattaagaacacctctagaggcagacactcttacgtcggcagtggtccaaaaggaaagggggaaacaagggacagagggaggaaaaaaaaaaaaaaaccaccgcctgattctaatacacctaattagccatcggcagactcttaattgcatacattaggatgattccatagtggagattaattctaaatatacccaagcagctggttaagatgccatggattacagtgtggactgtacttttccacttaattagatatcaaaattaagcagcaacaagcattttgacataacggggatcaagccgccgctcagcctcccagagctgcagtaaagtgaccgctaaacagagccgcacagatggagagatattaaatgccgcactggaaagtaatttcaaataataaaatatcaatatttacattttaattacccctaccgagggcctctctgtcattccactattgccaacgcagcaaggggttgagagatgacgctggctctggctgcaatgactgttttgtttccattaaagaatgacaagtgttttggaggcagtgacactcagtgtgcaagcgagaatgacagcggatcaggaaattcatatttagggactaaatgcttcaacaagagaattcacttggagcagcaggctcctccttgaaatacatcagcctttccagtttttctgccgaaagtttattattggggaggcccaagggaagttttagtctcccatgaaatatttagatccctaaaacgttatgtgatgattgtcaatttaaaaacaataatacttgatgggaacaaatatgcgggagtcctctgcatatcataaggctgggacgcttggtttcttactctcaattgcattggcaccaccaccactgaagaggcatccttaaagcatgactatgtctgatgaaagcctggcatgaggcttatactccagaccttagaaatgacgggcttgctttcatgatcttctcattgggattttattgcacacctttagtcacaatttccttgacttcaaaaagaagaccaacaatgagtcattattcatgtatgtgtaagtatgcagacacttacacataaacaaaggttattgttcacatatgtcttagtatgtatacatatgggtatagctatacctacactttcctctagatactattatttttctttctttattttttagaatatagttacgttcttatgggctcatcccaagtttaattactctttatcaagtgggaagataagattatgaaaaaaattacaggtatacagtagaagtgacacactgcattcaggagataataaaggaaaatggtaaaggctcctctggaaatgactgtcaaacgtgtagagatcttgaaagaatgttaatgcctcaagatatgagagagtgcataggaaaaactccttggtcagtgcactatcgtaggcagttaactgaccccctatctcagagcctccgtttatttaatgtgtgcagaggaacaaccataaatgtgataaatggcaacagcagcaggcagaatagaatttttcaaaggagagaaaggggaagttggggagctttttatagatgccgggtactctttttaatcccatcccttttaaaaacatcggttctgaagttaagataaaggctgggaaatgggcgaggggtaccaatgtgtgttccgtaacgaagggatgcttcctcctaaggaaaaagacatatgcagcagagccctgctttagcatccatccctaatgcttccagggcaagacggatccccatttctcagcgcccagtaccttttaatttctgaaagagccacggttgaaaatcttaattaattgttccatactgcttcaggatcattatgcaacgtaataaaggccgtgtaattatgaaattttacagccattaccaaggctgatggctcatatttcatcctcagctggacccgatggcttttaggcactcggctcccctttgatgaactacggacagatctatcaggcccaaacaatatccaggcgaggcagctataatagctacctacagatgaagccagagataaagataaactataaatctgcacacacaaatgcaggcacattgcctggggatggcagaggggaggatgagacgtttgggaggtggctgctcccacggaggcagcctcccaagcttctcatgcattcactccacaatggctctggtttcatgaaagagagacaagcccaagcgaatgtctcatttattccttgtatctcagaatcaaatgagagagggaaggatactcatgagcactgcatttagggcattactgggagggcagacacggttcagatagtctaactcctatttcagtggggtttcccatggaaaggcatggtctatggggtgcgatgttctacaccacacgcgaatacggcgattcaaagaaagcagctggcaacacatctgattctacctcataagtattccttatgcagatattaatactttgaaaattgtaattctagaacagcaaaaaaaaaaaaaaacacccacactgaaacacgggctggataaataaaatcctattcatacataactaaaacgtttatggctctcaattaccgaccgattatatcacataagaactcacagagcctaagatccaataaagctacatttgctgaacatatttccatcacatcccttttggtgaattaagcatttccgcgggtccttttaaacttgaagttaaatggaaaagggccatctaggacggtcatttggcaaccctaagtgctgcattccagggagtatctagttcaactctgcctctcggcagagcttcagcctcgcagtgctaatgccctcggtctgtaggatgccgttctcccatgctggctcacatcatgaatatgagctgataggcagcccgcaacagggctcatcctggagaaaagcccatgtgagggtcaacttaagtcagactgagcctggaaattctggccatgtggggcagacagggcaaagaaagagcagattgctggaaagccaggcaccaagctgacaactggtaggggaacagggtgggtatgtgtatgagggggagggaatgtataccaagatgatgcaatattggcttccggggcattgagactttggaaagtacaactcggcagagttctcaagagtatgggtgaagggtaaagggaaactggtttcagtgtaaccatagttaccaagtagctatgtagccttgatctagacattaagtgctcaatgcccttgtctatcatggatttttcatgggtgttcttcaacccttgatctaaaacagacttcctgatgtcggcagatgtagctgtggggtacaaggcttgcctagcatgcacaaaggcctgggcttgatttccagcaatgccaacactagtcttggtggctcattcttataaccccagcaactggtaggtgaaggcagtatggccacaagttcaaagctacccttgccgtagggtgagttcaagggcaccctcgatgcttgtgaccccatttcaaaactaaacacccaagtacacggctcccatggatggacgcttcctctgcctgaatcccttcctaggatgactatattttttcatttatgtcttctcagatcccacatttaaaccctaattgtccaggagctacttcccccttcccacccatcctggagcctatgtagctgctttcccgcttgtttgtcaggaagccgcctgttccctcttctctaggaagtccttttcaatgagttctgtccttccctctccagccacctcctgggctttctcccatacattttctgtgcagcctctttaccatgtatcagtctctccctctcaggcccattccttggtccctccagcctaatcaaatctcgcctctgctttggctcctcaacaatacttagttttctctgcctatctttctgtctccctgcacatctcagtgcctaagaatgtggcacacaggagcagctctcctgctctggccttttaacttctgaagcctggatctttgctccctctaacggcccctgcctacagaatgtcttcccttaacattttgtttcctttccttgagttcttctgtctagtctggtgtgtcatctcctttcccaacagtctccattgacagttagcaccccggtctttcttctggtctttctcccttcccctgtggccgtctttccaagcatacacacaatggcttttctatgcacactccctattcggttctatgggtataaggcagctgcattgccagcttacctcttcctgaaagagatacacattttattcccaagcccttgtcatccattcaaacctaaatatcccatagacattattggttgtctaaaatgggactcttctctctgtaaacttattccaaatatatcccccaaataccagcatcactaataactcagaatgcatcaattaaaaatatacaattttaaataatagaatttaaaggttggggttttctttgacctttctcctacatctaattctttccaccaattttccctcttctgactctttaactcacattgcctgtttcaagctcttaatgtttccagccatagctcagccagtggtctccctcctgccttccctgatgctggacttttcccaagaagatctgtagtaagaaaggatgtcaccttcctagctctgttgctcactcatgtcagtccacagagttgcccacagtcaggacccaatctacctgtctcgacttgtttactgacaaggaggaagaagaggagaatgctgaaaaacagaatttcctgagggcttactgtgttccaggcactataataatcagtcctgttgaatgcctttgataagacaagcattggaaatagaagacagaattggggtccttcaagggcttacactggggtctgggaataaagataaagacaaacagtaagccattaatgcaacattactgaatgtcctcatcactggggacaaaatggtcttcagggatggactatggaaaggaggagccacccactaggactggcctttgagcggatatcctaatgagccaatattacacgccagtatctaaatgctgcagaccaagcagttgtatattccccatattgatatgctggaatctcaatctccaatgagactatattcaggaatgggtctaccagggattattttgcctcaaaatctggtggaatttcatgaatgggataaatacccccaattaaagtgacatcagagatcttagctctctctacagtgaaaattctagttctattccaactctacatatgaagaaagtaagctccaaacacatttcaggtcactgattaaagcattcattgtagggtctgcacccagccactgggtgcagaatctagagttgaaccatctggtagcatgatcacacttctgtgtccttactaggaagtccagttcctcaaacaagccatgctagtatacgaccctccacctgggtgtcgtgtgccttctcccttccttcctgacaggccgcttcagccatccatgcatttctgcaatattgttctataaacatttcctgaataaacttgggcagacaagtgcttccttttctcctctactaatcagcccatctctagagccatactgtgtggatatgactgaagacagcatctctcctgagcttctttgtgtcctcatgctccttgtctttggcaaagaacatggtgttactaaaaattcccaagactggagatatggctcagtggttaagagtatttgctgtgtaaattagagttgggatagtaacacccacacatgcacataaataaaatatttttcttcttttgagacatgatcttactgtgtagcctgactggatgggaacttgctatatagacaggttgtctttaaactcagatatctgcctgcctctgcctccaagtcctgggattgacagtgggcaccacaacacatggcaaatcattttatttaactgaaaatgtcctgtctttttgttttgagtgtgtggatgcctagagcttggaagtcttaagaacctacccaaacagaaggataactgactggaaaggagcaagaatgggcagagtttggggcatggcagtgcagcagcaagtctgagaggagctaagtgctaaagagcacttcctagtacctctttcctacctcaaggggattcagaagtccctcaaaaaggaccagcaatcagtaccaggcaaaggtttgttcctaccaggtatagcttgagcagactcaggcaggtaaacaattcctcaaggatcgagagcctgagagctttgagtcagagaggaaaaacctcatatggccactgtgaaccccaaagaactagttagaacgtcttaaactcaagcttaccactatgtatccccaggttcaaccctcaattactccttcatattcttacagctcagttcctagtcaggcaccaagtttgttgccatggtgtaaagtggctttggaaagctaaatctccaaaacaatgaaatcgagaataaaaataaacgcagggaaccctgagaaatgactcattcatcattttcaccgagcaggtgataaagccagagctggcaacacttagggaaaccagtcccaggcagacatggcaacaccaaggagagatttaaacacatgtcaacatgatttacatttaaaccatttgatttgtttgcttatgtgtgttcatgtctcaaaacataaggctgatgccggggagagatggctcagtggttaaaagcactggctgctcttacagaggaccagggttctattcccagcatccacatggtgtgtcacaaccatctttgactcaagttccaggggatctgacatggcattctggtagccacaataccatgagcactgatggcacatatatatatataggcaaacatgaatacacatgaaataaaacaaatacatctgaaactaaaaaataaaataaaaataaacactgcaaaatagaaggctgatttcccaatcctgtcaatactatgaagaccagggccccaactgtaaagggatggttcaatgtcaagtctttgcagtcttgtgacacaagtataaggtagaacagcaaacatagattatgtcccccaatttccatgttagataataatgtgaacgtacattctgacaaggttttcaactcactgaagcattttcccatagatacacctccaggggtgcggactcccattgcacctacccatttaatgttggaactgggagagttctcacgaatatctaagcagaagggctcggagcagaggaacattggcgaacacactaaccactgataatgctcccctctgcatctctctttttctttttaaatcacctggtttactctatgccaaatgcgttggctttcttcctgttcctccaagatcaagcacacacctcttcagaatctgtgtataacctatcactaccagtcaaaggttagactccgtagatcaggcatatttcatttccttctttttggatcattttgtttgctatgtatcacagatatttagcaaaacttcatacatttccatgctctaaaatacaggaaaaactaaatgacatgacagtttagcattaacacagcagtaacattacgttaaattagtccgtttatagaggaagatgctcacacattctcagttctcaccttgcctttgatgcaaagaaagattggtgatcttaatctgagacttaatgaagtcttgtgtaaagaatattctatgatgactactttaaggcccagtaggactatatggatgttttatttgatcacctaatacctgaagtgaagttagaaatatgataaataaaaaacttagcaaagaaatatgaaacatgtactctatcttcttccccaatcattctgtctggatatattatgtatagaatttttgtactttaatatctccacttaacttattgcaggcctatgactgaggtgaccctttgagccttgcggcttattaaatcccccctccaagaattcaaatattgctattttcatattctcaaggatcctggaagagccagtggcttcagtagttcacgtggaatgaaatgggacaggcttccacatgctatgcagaaacagacctgctagatcatcagccgaccatgtttctccattcaaattagaacaaaaagcagcaccccagattggcaatttaaacctctcaggaaagaccacatgtggctacagacagaggcctgattgaattcactgttacaacacacacctcaaagtaggtgctcaaatatttatcaaatgcataaactcacaagcaacgctcatctgtgctatgcttatatttgtaatgatgtgttcttaagttcgttgctgcgtttgatttcatgtaaataaaaatgtttgtaaggaacttgacatttattaattaatagttaaggggtgagcagatgctagatgctcatctccttctctgtttctcagggatggaggcctggaaagagctcagacaattgggatataggagaaaaacagctagaaataaagacagctcaaagccaattacatcccaagtgaacctttacagggctgttttcaggatagcagcttctttagcagaatcaattcctgtttatcttcaggaggattccttgctacttaacagtcaacagaacaatttattaaaaaaattaaagatctgttctctttttaattcctagccaaagccagcattttgttagacgtttcttaataactcataaatgtggcaattatagatgagctgatgagacagggttttcttttgatgcaggcaacactaacgagagatgcgcttcagtgtgctacggactcttccgagtttattaattagtcaggaagcctttcccaccggaatggtgcaaggtatttattaacacttcagccacaaacagaacaaatgcacagcaaagaatgtaattattagacacactgatccctttatcgacttggcagggacaaccccaaagatggtgtctggttatgatctttttcaagatattttaattgtgcttcttaacctgataaattaaaaactacagggcaatctcaccaagatcacagacaaaggagatgctatcaatttgcaacaaaaacgtatgaggagtgcttctatcggctttaattacatctcgagtttaacaggcaaattcaaccagatcacagaaggatggagaattcaccattactgcttagcctgtggtgttatcattccgtgtgctgccgtagattacacagcatgagccccagtctagggataagtttgggaaataatatgtctgaggaggaggttttctcagctacttctgtgtctgttggtgactcctgttactgggtcttccatgtacctgccatgaccctgaatacaaaagcaaagactttaaagaaaatggcccaggactcttcccttcttgaagccaatatagacagcaagtgtggtttacttcatgtctgtagttagttttagaccaaaattcttcatttccccccaaaccctttactgccctccaggccctacttatcttcctcctaaacgtcacaccactgacacttcttgtccactgaggactggcaccataagtcctcagagttctgctcattgaaggtttgggattttcatctctaccacagttggggaccttaacttgggccagctctttggtaaagaactgactgaaaaggcactctgtagtaagtctcatgaaccatacatgcctcatgtgtgggtgtggcatgtgtggacgtgtggcagaaaaaggagagtggaggggaagcgggagaagaggagggggaggacacacggggggggggaagaggaggaaagggtgggtaggggagtgggggaagggagggaaacaggagttggggagagaggagtagaggggaaggaaggagagacaggagaaggggaatggcaggagggtgagaagggaagaggaagtggggggtaagtgtgagaaggggggagaggctaattcccctctaacctttcctgacccctaacctatcctatctgccccggtacaccctttcttgaagtttgtgtcttgataaattccatgtgtgtcttcctttcttgatcactttccagctatagcaattcttaaccactttataggattcaagttcctttcatccttggaaaagtaaagaaaatgccttattctggttccttatacagtaactcaaacactggtatatctcttaaataggagaaatgagcctccattgtatagtcatgcaaccatgagccatgaccaggcaaggtgaatggctcccccatatatcctagaggaggcagagaagaagaagacataccatttatcacacatatattgcttatatttggggggggtattttcaaatttttatactcttttatttagcagatcaaaacttttaatagcgagagctatgctttaaaacagtacttttcatacaacaatctttctgcaacattgtaaagttaaatatttcttgaatctacccacagacttgctacagcagctttaggtccctatttctcatgggaaatagtgtcatacacataaaaaagaatctcagtttgatgtcactggttttaatttagtgtttatttgcactcaaatgattctcagttcagggtaccacctgctgtctcctccccccaggagatggcatttggagagaatggtggagttctgaattgggacttttagtagaagaagcaaagggtgctaaatgtcctggaaaacaaataatttcccaatccaaatggcaagtgtaccccactgagaaacactctgagttaagggcaggaaagaaatgagcccagaaactgacaacacagcacaggagaccttctatgagccactgggaaaaaaataaaaaaataaaaaacaagcaaaacaaaacagtatgttctaaacttctcaggtcctccaactgctatccgttgatcttcccaagtcctacaatgaccacacacagaccttcccaagtgttccaatggcaaccctcttcctctcccaggtcgttcaatggttacccactgcctctcccaagtcctccactggctatacacttcctctcccaggctctccaatggtcacacactgatcttcccagatcctccaatggctaccaatttcctctcccaagtccaccaatggatggccacccaccgtcctttccatatcctctgatggccaaacactgaccttcccaggtcttccaatggccaccattgactgctccaagtcctctgaagctcacccactagcttttccaggccctctgttggtcacctatcatccactctatgtcctctgatgccacccagtgaccttcccaagccttcagagggtcacctactgcccttttcaggtcctttaatggccacacactgccttccaagtcttatgatggtcacctaccctcccttcccaagtcctccaatggtcacctactgtgtagccctgctagttcagctatagactttccaaatatatcctaaaatagattactgttcattcttcagttgcatgtttttacattacctgccagtattttccaagttcaaagaatagaaacaggggtttgtgtgtgtgtgactgtgtgtgtgtgtgtgtgtgtgtgtgtgtgtgactctgtgtgtgtgtgtgtgtgtattggggggttcataaacatccaaaatttccttctgtgtcactttgatcactcaaaatgtaaagaaccaagggcttggacatcaaggttaggaatatcttggcagtgtcttttatacaccattacaattccgccaagctttgaatgtctaaatattgtcttttagagcttcacttagcgacattccagtctctcatactataatgacttcatatatttccccagttttactatgattgcattacagggtatccccctcagtctactcaatagagaaacaatattcactatgggatggatgcctcacactaagctttgcagactccatttctactaaaactcccagtaatatgtaaattatacagctcttaaggacatagaaataaaagagctaaagaaatattgaagagaaatcatcaagtactcacttcgggtttatgtttaatacataaaagacttttttaaatcatagattcttttaaatatcaaattagcaggaattttggatcatctgaatttgaacatgatgtcaaagtgaacagccacgtcctaactgatatcagaagaaagacgtgacatgtacaaccatcatgaacatgccagcacgatagcagcctttgggtccattttcctcatcggaataaaacagaatcaaagtctaccatcttcacagggatgcacatgagagcaaggggacacctctgcaactgcagtcttacacaatcggaatattacccgtgagaatggtggtcccgcaaggaagtgtcattacagccttttggaattaaagctgccattctctcatgcatagtagaagctctaaccacggtggaagaaagcagctcatttaggtgaactttattataccaaattctaaaacattttagtggcctgggttggagtctttagaaaacaattagacatttctgtgtttctaaactaaatctacgacacatagtttcctctatgagctggcctcagtgctgtaatgtcctggcacagtcagagcagccctggggtcttctataggtcactgaggacatagtggagtgcagacaacactagcgagcttccagtgctttgcttctggtgtctggctggcatttttccttttcctttattccatgcagaacgccagcttttaatcgtggaccatgagacacttcatttagcaccattctcccctccattttgctgcgtcccaggagaaggaaactagttaaaatgacaggaaggtcaaatggcctctgagcaaaggccacagagctgctctataactgtgtgttggtcagcattgaattgctataagaaaacacctgggatagtcaacttaagagaaaatatgcactgtgcacacatgcgcatgcgggcgcgcgcgcgtgcgcgcgcacacacacacacacacacacacacacacacacacacacacacacacacacacactctggaggctccaggtcaccaggctgcttttgatatacgatgaagcagaacttcaaagtgggaacaaaactgctcaccacatcaaccatggagcagagaggctgtggagaggacaggattctaccactccctttgctggaaccccctggtgaccaacaggtccctacctgctcctaccttagaatggttctactacctaccaacatgacaacctgggggccaactgtgaacatctggagaacacacagtattctaactatagaacctatggtatgggtggagttaatccaaaataaaataatggcttttattattattttatttttgtctggtttggtttggccacttggaaatgggacttattgtgtagctcaggctgtcctacaacttactattgcccaggctgccctcaaatttgcaggaattcttttccttcagtcatcaagcccagtcatcaagccctgtttcaaaaattctgttctttctaacaatgttctagttatctggcttgttcaacattttacttgccatcctttagtgaacatagaatgagttcaaagacaatgatgacttttattttaaaatttaaatgggaacttccatgtaaatatatggctattaaggtttattgattttcctctaacatgattaaggaaacactttaagaattagacactgccagaaagagtcattatatagtattttgtgaattaaaatcccaagaaaaagcaaaaccatctactacattcaagtttctctacaaggctggttaactgactaaaccgtgctgcagagagataggacgttataaacaaaggcaaactgccttgagctctcttcatgccgctttagtaaccattcattgtccaccttgatgtctgacctaacatccttcaaatatgaagctgacacattccaaaggtattgcctaatagaccccatgcttccaccaaccccaaagctgagagcatcttcacactgtagcagaggctcctctgttttgctgtaaccttcctgcctcatgtcccaccaatgtattcaatttaggacttaacttagttccatggctacaaagttcatgtaacaatctccacattgggtcatgttttttggggcatccggagtctacatttcttgcctatgattgctcgtatttggctcagaataaattatctacacactctcccccttgatgaaagagctgcattttacaatgccagttcccatgtgtttacagataactcccagagcacttctgcaatacaacaatacaccgtgtaaaatgactttacataatctcccacaattcaatctgaagcttgtgacattcccatctctgtgcatgaattctaagcatttctagattaatataaacatttagatttaatccaccattcatgtacaacatttctctatcaaaattaaaatttatcacctgggtttgtaaaaactattttcataaaaataatagcaaattgattttttagtaactaagcatccattcctacatttattaaaatgtacaatgcttatataatgggttttaaggtttctatttcaatattacttatgaatgtgtaattagccccagaataaatgtttcctaagaaatttacgataaaattacattcaaatatgtggtggtcacttttagactttattattctttctattttcttttaaaataataaatataagaatttttctccaactacattgtactggtacaaagacatcccatttgtccaataaacattgtttattttgttgatgaaaaagatatttcagcagatgaggccacagagatggtcctagaaccaccaaactaagttgcatattatttgaacagtaaaccataaactctcctgtggataggacaacagttttcaaggtactcaacaccagcggcttgttttttattggaaatacactagggcagggtctcttctcttggacatggtagcagtttttgccagcatctgtgacctctgtccattgtgtccctcacaacaattcctgcattgtgacaactgggatagctctagatgctggcaattattcccattggtgaaaaagtaaatcccatgggaagagaacactagggaggagtgatgtaaagctatcttcccctcccaaattgaccctcacttgacagtaaggatgatttcaagaatatcgtatcttgctggtgatataagtcacccctgtaatctcagcactctggagattagagcaggaagatgagcataaggctagcctgggctacatagtcgagatccactctatctaaaacaaatcacaacacatctcattttggttgaaggagcattttttccaaaccgaacaatccacaaacttgagccaagtctcgattcttgctaaacttgtccccaagccaaaactcctcctctcacagcaataccatcctggcttggtggctctgcaaactgtgcagggagccacacttgtctaaaaggtcttctgtcacaaccttgaaattttaaataagtttttaataagggacctttgtttcccaagggtggaccatgcactaacaagaattaacaaatcaccagtacagcacgcctcactgaagtccaggtttgccagcagatcttttgagattatgctgtctaacaaccaagtgataaaataaaaagaaaccaggctggaacttaaaatgaaaaatagaactaatttatataagtaatttgagatagataaagactcaggtttggaatcacactgacctggccttaaatataatatccactatcctaccagctttaggatttcaaacaagttggtttttctcaaatatggtgtcacaggcagtccttagttataggctgtttcctaagattaatcaagatagtaacagaaatcaatggcaagggggcctaagaggacttgggctgaattcaccgtggcttggaatgaagaggcacacgtcagcctctaaagacagtaacctgaggagttcaaatcccaatccctctagctgaagacttacccagcattcctcagcctctcctaacaaaagaagtctccaatctgtgtctttgagacatcaccaaatgctgaattcaaacctggcctttggtttacaccacctagcccaaaagacgagagaaacatatctgattgggactgcaaatgcccgtctgccgacatcgccggaagttggtggtaccagcatgcgtgttaatacatttcatacattagagatgtaaattttattcttggagctgaaagccaggtgattaattcttcatagcatcgtgatcaatgggtgcagatgctccacctgtattagtgtttgtttttgtgcgcattagtaacaggaacgcaccaataacacaggtgtctgacacggagctaggagacactctccgaagccggcaaacattgcgatcactagttaggttgcacgcagcactgccaattttttcaattagacccattattgatttgatgaaatagcaaattaaacataccatggtggtatgcaaattggttagagggagcagaaggttctggaacagagcttcgaggcatagcaactattggtttacattggttgtcactcatgggggtccctggccatggctgctttataggggttccttgagagccataaactggcttgtaaaataactatcaggaaagatcaattctgcattttttttaaaattcaccacaaacatagaaggaaaagaatcctggaaatctaacttcaaatgggaaaggaaaaaatggggtgggggcagtgagcccagaatctgtttctataaaggatagcatactctgcctttccagatacaatgcagaaagattatatccaaaaggcacagccctgtggatttccttatgttgacccaagactttgctcaagtactccctcaggtaaccatgcccttgggagaccacactctggggtggccactccctcagatgaccatgctgtgggagaccacaccctcagatgtctactctgtcaggcgaccacgccctcgagagaccactccctcaggtgacccctacttcccaatatccacttgctttcattgtgtatacttgaaactccccagccttgtctataaccagaatctacctatacaatacctgcttcaaatctgaaaacacgtctgttattgctcattaaatggtgtctatcatttcctctgacaaataggaacctgttcacggtgctggcttcattagaaattaaagcaagtattcacttcagtgcgtgcttgccttctgatgcatgtgtgtgtacatcttgtagtttagaaagccctttctttaggaaacctaccctggttcaaaaggcttgggtctctaccaggatacactgtagtgagcccagctatgctgccaatgcccttaggacctgccatcattttcctcttgtcttatctggaattgctaacaggcaccaagatttattttctcttgttgttggttttatgaggcagggtttcatgcagcccaggctagcctcaaactagccaagtagccaaggatgaacttggacctatcttcctgcctccacttcccaagtgccgaggacaagccacctcgcttatccggttttacagcactgggctttagaacagtagggctgtagctgcactgtatgtgtcattacttagcagctacttacagaaaagaactgaaaacactcaaataagtaaatgatgcatcaaaaaaggtgtgatcttgtcaactttacatgggaatgtttattaagtaatattctaaaagtttgttctgccccaggtgaatatggaaacttgcaagaaagagaacagcattgctggttgtggaactctcaatgctaaccaaacagaatacgacaacactggagtcactcagtgacaatctaaagtgcaaccagaataagcagcaggtgttccaagttcagataactaagttcttcacattccaccaagtgacttgtgctagagaaagcaaagatattgcagagaagagaggagccagcctgacatgaggaggtaaagtggggtagaaaaagccatgagaaaaagacggcaaagttatggggagggtctctgttagtaaaaaagtaaaataaccaggcaagtgtcaccactgatcagtgaactgagctgccattgtaagcatggttagggaacatacattcacatcagatacacacccaactgcattttatatcctttgaactagaacatgttcaatgtattgagataccccatgttcaaggctagggaggtggcctagtgggtaaatgcttgctgtgtaagaacaaggacctgatttccacactcatattaaaaattgaatgttaactatgcttgtgtgtaatagcagccctcaggtgacagataggtcagacagatagatcaatatgcctgcaagcaccaggttcaccgtgagaccctgtctcaaaataaaatggggggaagttgaaaagacactcagtggacaaaagttcttgctatgcaaccctgagggcctacacttgaatccccacacctatggcttttgaccccagagacatagggtggagacaggtggattttgggagctcactgactggccagcctagcccaaacggtaagctctggtcccatgaaggactcacctcaaggcaatgacctggagagctaaagagagagacacctgatgtcttcctctatgaggctttcgtacaattactagtacactattatgcaggcttcaaagtaaaaatgggaaattaataagcaaagtgcagaagcaattgaggaagacatctggtatctgccttctagcttccacaacacatgcacgagttcgtgcacgcatgcacactcacacacacatatgcatgtacacacacacatgcacacactcacacacacacacacttgcacatacacactcagacacatgcacacacacatacacactcgcacacacatgcacacactcgcacacacatgcatgcatacacacatatacacactcaaacacacacatgcacgcacacattcacacactcacacttgcacacacactcacacatatacacttgcacacacacatacacacttgcacacacattcacacacatgcatgcacacacatgcacacactcacatacacacacacacacacacacacacacacacacacacacacacacacacacacttcttccatgtcgattttagagactggaaacctgcatatatcctcatacatgctcacagagaacagctcagggaaaagggatcctttgcccacgcaagggtgcttgctctacaatgtgaaacttggaaaaattcagggtttatttgcccccactccctgaggaaaagtatttcatcaaaacagatgaggcttgcataaatcacccgagcatgtttggctgtcagggtttttctgtatttttacaatcgtgagttcattttcttaaagagggaatacagaagaagggggctggcgctggcaacagtttcagagggaagatgatgcatgttttctgtcatgctggcatctgacttgggccatcaggaagttcagttcctgccccttatatcaaagtttgtctgccattgtggggatgttgttaggagttgagaaaaaaaaaaaaaagcaatgtccatttgaagcttgtcggtgaactttgcatgaaccgccaggaataatgcagttggatgacaggccagttataccttccactaaatttgctgtctggaatgaactgaaatagtgtttggtttgtgtaattacgtccatctatctttatattccagcggcatatcgcaaattgaaaatactaaaaattgactgttggttctgatatttaatgattgccaaagacaagaccatgatttattggttacttaccgatgtgacacatttgcatcttattagacggagattactattccttaaaatgcggacgaggcctgatcatgtctgatggattgatttgatttgcaaatgtaatcaaactaataagagggaaaaaatgagcaataatgccttgtttttcaactggcaatcactcccctgccaacaaggctgatacccctgactaagcagccttcaccagccttcctgtcgtctcaaataaacaaagggatggtaagagcctgataagagggtaacaagccaagtgtggatgccacatggagcccatcccctcaagagtaccactgcagaacaaaagttaacaggagagaagaaacaggactgtggacgacttgaaaaggacaatggcagccagcttgatggtccatcatgaccatcgcagtaaatgagtcttaaggaaaatactaacatcctctacgatgcagagtagaacctgtgtacgcagggtctccatttctgagacagagtaggcacttaaaggcttttaggcagatcctggcatcggcttcactcacggaatcttactgactctgaaagcatagggaggaggcttgtaaggaggaagacctgagttgctaggcaaggttaccaactgaattcgactcccttctagacaggacttcaagacagttatgcataagacggaatcctgaatatgctgcagaataatagtcttgaaaggcaatttcaaaatctctttggatagcatataaaccattcattgtggccataaaataaactcagagaatgtctcccgagaaaagccagttagtggagaccagcatatggatggtaagctcaccattgtatacctccttttattatatgcattaattggcacacacacacacacacacacacacacacacacacacacacacacacacacgcgcgcgcgtgcgcgcgcgcatgcactttgttgttgttgttgggaggcctggatgttgcagaaaatgtcaccctgaatttttaaggcttattaccatattcaggtatccccaacagtatcttactatctacaccatgcgttcagcctaaataaaacttcactcaaaggttcggggtgtggatcagtggtagaatgtaaccatagtatgtacaaggtcctgagtgtccttctaaggaccaacaaggccacccaaaagtaggatgatgacattcaagctggacaaacagcagtcctgcatgactagacaaaaccacttttacaaacctagttcaagtttcacagcagaaacagtcataataagatgctcactgagtgtaatgggttggacagccagcctgaccagtaaattactgatcagggattatcctcaagctaattttagccaaatgttataaactgataatcgtccagagacctcgattcttagacaatgtggtgtctacatggtagagttgaggatgctttgtctcttaggtacacccacatgacttcagataatgtcagcttttggttcttgctccacaaacttagctcagaattacgccccttgaccactctcatctcctctgggtagctggtcatgtttcccaatgtgaagccccagtcagagatgtgtttccagtatatctctctgcctggaacacagaattttgtctacccagagacacataattctccaggaaggagtctgatgtatcctgggagtatgccaggctataaaaaagaataggtgagttgattgtttatgatttgtgatttttaaaaaatgtaccaaaaataattcctagaacctttccatttctgtaagtctatcttcagaagactcagtatctagaatactgacaggaaagctcaggcagtagggtgcttgtccagaagacacattaaattgcccaggctgagtggtgcatggctgcagtcttggagctgggaaggtggacacagaaagatctctgggcatcttgtccagccagcctagggtctacctggcatggggaaggccagtgagagactaataaaagttaaatggtgcctcagtcatgacacctgagcttgtcttccggcctgtcacacgtgcatacatgggcacaagcacacaacacatgtatacttgtgcagaaatgagcatgggtagagattacatatcacatcatgtgatatggcatattatacagctgacatggggtagttttctttctaacactctgaataaagatttgtattcctctctgaaaagtttgctactgacaatgataaacaataatcctgtcaagcttgtaagttgagagatgcgagactcagtctcagctctgtctgtgactagcttgtgaccttgtgcaggtcacttaacttctgaatatttacacacaaaaaagatatgtgagggaaggcatttgacttaaccctcactaaaaacttaagattgcacatcatatttgggctgtggcctttgcttacattagcctccagaactctcccagcaaccttccccaaatcctgccttatacatgctaccttgaacatatgcaaattgacattccaacaaatagggtctctaagttcaaggacagtatgctgctcactgaagtacaaagcctcctctcaaagtaccaggctctcctctcagctccaaggcccttgccagagctcaaaccatcgtagatttgaggggtgagggactcactataatattattatacgtattaacagagtatggcaaagcttccccttatggtgcttctgaacaaatgagcatatgtaagcagctctggggaaattctatcataaagccctttattcaaaataagagtaatttgcagaaacaaatctggaagcaattggtccatttactcctatgaaagattaactcaaaacaccgtaatgttaagacaacccgattgggggctgttcttctttcaggggtgcaaaggtgtgtgggccccaccaaaacatacaatcactatgtaagcacagactgccttttgcctttcttccctaaactgctgaccaggttgggaggacgcagtctatctctgaggccccagctgctgctcttccctcttgcctccctccttccatcctcagcagcccaggccaccatgtgccctgtcacgaacctgctgactggcagcagggcccacgccccaggtaattaatcctttcctaatgcaggttaagcaggtgggaagccttcctcatacagagagggggtagctggtctttggagatgcccctagagtgcagggatttaattgggctcacatgattccctgaagctgggcaggctctggtgctgacctgcacatccaattaccaatgtgtttcacctaaatccagctgaggaatcctttcttctctccttctaagtgctgtaatattaacatagcagcctgtggtgaggatatcatgttcatagaagcaaagccatgtgctgagaggacacttgtaaaattgagagattaactgaattcaactgataaggctctcaggactaacagaagttagggtttatcagacagttctctctttctctctctctctctctctctctctctctctctctctctctctctgtgtgtgtgtgtgtgtgtgtgtgtgtgtgtgtgtgtgtatgtgtgtgtgtgcatgcttatacatgtatatatgcacgtggacatgtggagatcagaagacaacactggtggtactgttcctcaggcagcgttcactgtttggtttgttttttgagacagactcacagacttggaactcatcaagtaggctcctgtagctcaccagcaaataccagggatccagctgtctgcacttttccattgctgggattacaacaataaaccaccacattgggcttttaaaaaccgagttcttggaaacaatgcaaacactttccttgctacactctcccctgagaccccccaggctcaacagcacacactggaagtttttagatcacaccctgatgatactgagctgtgatccaagagcaaaacaaagctgaaacacctctctagagggggaaacacctttccagcataatacattcaaaaacaaagttgtggacttctgtccagacagtaatgtcatagcaaagaacattttagagaaatatcgttatcagggtgtttatatgcacacagaaggaagtagaaaatacttagaaagttttgtcagccaaagagagtgtgaataaagattctactgaattctcacaaaatgtcattcatatgaactcactagactcactagactcaaggccaccccacccccgccacacacacacacacacaccctttgactcacaccagatgagaaagagggaccataaagaacagggtcagcaacagttctgacaatcccctggcagagaaaatgccataatctgttccatctcagtatcagaagatcttccctgggactcttgactccttcaacagccacccctgccccctgaccacctcacagctccgcccaccttctacccccaccaatcacaggaaagctctcttgtccgctccacctacacctgtcccattgcttttaactcatcaaaagcacacactatctcaaacctgtgggtttatcccaaaccttggaataactgtgaagcaggcccactcagttatggaatgaacactgcctacattgcaattatggagcgagtgggaaaacagagctccgtggctctcctacactggagtttgtgatcaagcattttatctttctgtgctcttgagaacagccataaatacaaacacaaaaacatctacaaacagacttacctacctatacatatactgacctctacccatccgtctttaatccttttccttcctagttccctccctcattctctctccctcattctctctccctcattctctctcccttccccctctctctttctctctctctctccctctttccctctctcccctctctctccctcattctctctcccttcccccctctctctttctctctctctccctctttccctctctcccctctctctcacagtccccctctctccccctgctgttactacacctttgaaacatatgaaaatttgtatatggaagcttggaaagtcaaattcctttggaagagaaatattcaagctatacaaaataagatggtgaacacgaaaattctagttagtcacctgagctgcgcactggcacttatctacgaaataaaaataatgtatcaggaattccatgcacacactcttcctaaaaagaaaactcagcagataaaaaaattaaataaatcacttctgcatttaaaaagtgtttttaaatgatgtggaattctctagaaaaccatttctctggtgcctgaagtccccagctgccacacaatttatatctccttccttggccctttgtttttctgccattttccctgaatgtcaaagtcaatttagtgcatttcactttgctgaataaatcagaggcgaaatccttgctaaaagtgaaaatttgatttgctaaaaggagcttagggcaactattaatcaatatatccagagtgtcaaagccaaggccaggatagacacgcattcatttggagattggctgaggcggataaaggggaacactggggaagtatcaccagccactacgggaagtgagggtagggttagaagaagagctggtcaccaaggaacagagtgagaagctcagtgccctgggatctgtgcaccacactaggatttttttttttttttttctgacagcaaaagtgactgggttacactaattctgccagtttttatacagcaaattttctcacagtgtccaaacaggttactctttttcactctttaagaggttaaaagaacagtctaaaggtcagaagtcacagacccatgaataaaaagaagcctagacaagcctaaggggagctaggccaggtccacagagtgcacaggcctcaggacaattagatcacagtctgttgtaaaccaaatgactagttctccatcgtagcactcaaggcgatgaaccaggaacccatataaaaattagaacccatctcaggatcacagaccctctgggataaggcagaactattttccagagcacccagtgatatcgctgtgtaaattgcttcaacctttctgatttaacacttttcaaatggcagcctcaatcagatagttggcaattaagatctttagaggtgttagccccgccttcaacaggaaatcactttcctcggtgtggaagtcaaatcactttcgtctgtggtgaggcctcctgcttctctctctccacttctaacagtcggcctcagccctcatcactctatttagttgggagttcatctttctcaacacccccttcccatggtgcaccttgaggctctgagaagcagtacttgtgaggtgttgtgaggtatttatgtgtgtgtgtgtacgtgtgtgtgcctgagcacagtatcttacacaggcctcactgactgctcctgtggaaggaaggggagaaaggactgggaatgtagatgttgattcaatgctaagtagtagagcatcttactggtttgttggttggtgggtaagcaggttggttgtttgcctggggatctaggttctagatttctggggtttacaggaacggcccccacccgtctggttcacaatttttacatggcagagtgacaactgacttctgcttctgcttaccattaagtgccaatcaaattcatgcaaacctccacttagttggacgggggagggtgtgtgtgtggtctttgtaagcgcctcagaattttctcaaatattcacaggaggagccaaatggtgactgccctgcttcattaatatttgtgatgtctagggaatagtatcaatcaagcatcttgatttttattgatttaaaatgtgccatgagtttccttctctaatcactgaccttcctttaaccttcagttttgtaaatggaaagtaaatgctaagtttgtaaatgcaaagtttagactctgggtgaataagtcacatcatcttccatttgttataaactacaagtaggtgccctgggacaaatgagaaacaagtggtatgacacagacgaagagtgtgggggggaagacacatggaaaacactggcaagatattggctgttcttgatagagcaggggcatggagtaagccctgtctaaactcaagttcctcgctctcaaagtgagcaaaagtggagcaaagagtgagccagcagaaatgctgcaggcagcacagaaggatgcccagagtgcctcctaagcaacaaagtactccgtagaccagggatggttatggcagcctctctgtaattccagctgcagcagcacggactcaaaatcattctgaactacacagtgacgctgtcactgaaagataagcagaatgtatgcatggatgcagttattttacattttaagtttaagcccatcaaaaagaataccactgaacaattcagatctaaaactaataaaggtataaatcaaaaagagaattatagatgtgtgtgtgtataacattcatatacttatgtatttacatagatataaatgtgtgattggggtaactacttggttccttacatcttttaaatctcctgtagactacacatagtgctatgtgcatagctgatacctgactacttaaaatgcatttaagtcatggtttaacaatgtgctgtacgattacaattctattttgattgtgagtatgcaatagcatggccatgggtgggtgacgaaaataggcagagatctccagtgactggccagggtaaagctagggagagctcacaggagcagagggaatcaggatgatggcagagaggagcctcgggccctgacttttcttggggagacatggggggaaatctattcactttagataggccacctccaacagactaaagcaattattgcaatccagtccagatgctgtctgtggaggttaaccttggctgtcagtccaacatggtctagaagcaccaaggggacaggggacacacctctaggtatgtctgtgagagtttcaagtttctaggctggactaactgttgtggaagatgcaccgaaatgtagtggcatcgttgtgtggacagggaggccactctattctctagctttaggtgtactccaatagtgacatggtggcccccattcaccagagagatatgcctctccatacaatgtggaagaagataactatccaaggcccctctagctcagggacactctaaccctcacgtgacccagcctctcttccatgtctcatcacccacacacagcaaggggcatgtcaaccatcccatactacatggctaaggagagacatatttgaattgagcccatgggtattctcaatccagttcttaacctcagttctgtgtcttctgacctatttcagggttgatacaatcactccttccccaaattcattgtaggttctgccagttattattagggcactattgttattattattattattattattattattattattattattattcatggggaaacataaagaagtgtctatttaccccagcaagggcactgatcacatacacacacacacacaccccagccatatctagcttggtgaaccaattaagaacatgaatgagtgacttagagaagcttgaatgactaaaagccaattgttttgtctaatgaggaacttcactagagtcccctgcacaggatataggcaactctattgaagagtctccctaccaggagttcattgtttacataatctcagggaaggaccttgtgggttgctacttttttaaacttcctggttcttacaacatggttaccttcctgggtcttaggaactacagggcagacattataactcaaaggagacagctgagttagactcaaggcactgagtgggaaggacaggcttctggggggtccccagatcaacctgtgccttgtctcttgaacttgatcttttcactgcccctccattggtcttcattacttttccagcaagggtagctacagaaaatagaggagctaatgtccattacccattatcaacccagcttaaagctccaaaactttacattattaaagtctgcccaggagagacaacattacttagacaataatgggtcttgtttccctgggaatgaatgaaaatatccacacaatgatctcttagctcaggaagtgaccgcttgtttattagaacagaagtttggtggatgacttctgtgaacactaacttttggggtcctttggatctaaggcactgaaaggacttcatgtaagcaatactatgcaaataaaaatgggtctcagatattttatgtttagatggcacattatggcacatggatgaattacgtatagatttgcaatttccatgtctttctttcctcatttgattttcacaatataattaatagtgtcattaaatagcataaaacatcctcagctacagctcctattttctgattttactttcagaagcttttaaacaatagttataaagggctacaactagcttatttgttaaactgtctctaaatactggataattgaataaccttgtaccttagcctcattcactgcaagggcttagggtctccacttaacttttatccagttatctaatagagttacacagacaaacagtgaaatattcaggaatgagactgagtttactttaactcatccacagtgtaaaacacaaccacatgtgaagtcagctatgggatgaagtcaatgtgagtctgaaaggctagctgaagtttcatgcacattttaaatcaatgcatcaaagagcaactatccaggtttactgatacagaatcaaaatcaatatgacttaaatatggcacgtgtcatctttagtcaaacattgccaatttcttaaatatcaaataacatactatactttccacacagagacgtatttgtattaaaaatgagacttgattcaaagaccattagaccttcccttgttttcatacttttatatgtacctcacttgagggcaccacacattgaaatgggggaggctaaggcaggagcattgctctgagtctgagttcagactgggacacagaggaagacggaagccagcctaggctaagtgagactctgtctcagaaagatgggatatggggtgggaaatttaaccaacaatatccagtaaggaatactgcaaaaataaaacctcaacatcagagtataatcttaaaaattggtctatacagaaaatccatttgaacaacagtatctttaaacagtgccacttggaaccaattctcaaaaattctttattattttataaaaaatacatgtatgtatatgagcacttacacacatacacatacaccttagcatagaaagagtttggctcatgttcttttgagattcctgtcatcacatcaaagtctaaattaaccaagaaaactctagaaagtcatgtcagtcaacaacttttgatatagcctcttaattgatttttttttttttgagacagggtttctctgtggctttggaggctctcctggaactatctcttgtagaccaggctggtctggaactcacagagatcctctgcctctgcctcccaagtgctgggactcatgcaccaccaacgcccggccctcttaattgaattttttatcaaaagaattatcagaaatgggaaacactggctagtgtagctttctatttcctagaggaagaaacagacatagaattgttttataataatttcacattccaaatatggtttgtttatagaacttaacactcctgcctcggctggagcaaagtcacggggttcttccatttttttgtctagtgtcatctttacatcagacagagtgttaagaatgtgacagaatggtctggaaacaaggtttagtggtaaagtggacttgttgttcttgcagaggaccccaaattcagctcccatattgggcagttcacaaacagctgtaactctaagttcatgggatccaaattccccttctggcctctgtgggagcctgcatgcatacggtacaaattaattgatgaaggtacacactcattcacataaataaatataaatcctttctagaagaatgtgactgaaatgatcccaaagtagagccaatcccttcttggtggggtgcacaggtcagtgggagaaccatcacctaacttgagcgaggcccagctttcagcccttctgctgcaaaaccaaactggttgatttaatttagtttttcaaaaggagatggtgacctgaaagtctgccacattttcttctaaactacactaaaccacatccaggcacttcattgttcaaacacttccctgttcttttaaagtaggaagccgacaagatccgtaaatataagaggcacttacataggtcggttaatacgggctatggctttttaagtaccacctgccaagcccatgctgtattttgctaacgaaattccaggacataataatatcctaatcggccacaaagaacaatcccagatctgcttgttgggctgataatcgtcttatcacaccctgtgaaaccaagctctgctgtctgatggagcctccattacttggcagcctgttctaaaaacggccaacaatggagagggagtggagtggagtgtgcagagcctccatatctacataaaagagattagaggcgacagcgttccattttacaactcaatcatattgtgttagcatgcgcttatccgagcgcggacgaaattgaaagagaaataaaaaagagccaggcagataggaagcagaaaagcgaggcatgagcaatttccaagggtataaagggatgctaatggcagggcctgtcatttttaaaaagggctattagggttccatcatctgttcttgtgccctcacactcctctagccaaagtcaagcattttccaggcccttgtagtccctggtttggtcttttttttttcccctatagataagtgtggtcatgtttcataacagcgcaatcccatttatgtggcttattaatgtaagtcaactaattctatttactgagaaaaccccctccctctctgtgcatttttctccaatattttctttggtagactccttcccttttcatgaggctgaagaaagcacactaaggtgtgtttgccatggtgcagcagggagctggcccaacccgaggtgcaaggcttggagcatgccagtgggtgtatgattacacagtgaagaacagagtgagtacagagtcttgaatctgtgtgtggggtgtgtgtgtgtgtgtgtgtgtgtgtgtgtgtgtgtgtgtgtgtgtactgtgagcatgtggacatgcacatgtgaataagttcactttactttttaacatgttacacagaaaattcaaaaggtaagaccaaaggggactttcagtccacttctagctgtaacctgactccctactcatttaggaagactggctccctatggagaacacaattttactttcagccagccagccatgtgactatgctctccttgcctccacctccccatccaatgctccacgtgacaccacgtggttctcagatgccttgagctcaggcaagtcttgacgctacctggcctcctgcactatttcctgcatgcatattgtaaataaataaataaataacttaaaaaagatttcagtggattcctgtttttttcttttctttcttttcttttctttctttttttttttcaaatccccttctgaaaagctgaggttctttttggaatcatttgaagtaccttctgggcacgaagaaaatgacagccacgaggcgtcattccacagtggcctctcctccattcgctctggagagaggatgtcagcccccaccaatgcgaagccgaggcttatgacagagcccataatcacatgctcattgtttccggcactggaaacggcgctacttggagttatttaaagttaccgtcttcgcagaagtcgcccaggccatgactccagcaggctgctttgtaagccttcatctccacttagatgcacaatcagggctgctaagtcacctctgacctttcctaaccatggggcttgggagaagttgctatatatttttttatagctggtctttattgtgacaatcctggatggtatcaaaacattgccttaataaatctcttaactcagggagacgagcagagctcaggggaatgataggtgattcggcttcatgatggcaggattcacactgctgttgtttgtttgtgtttatggcagggggcatggaatccagagggcaatgctgagtgttttcctctatggctctccaccatttttttaagctagcaactctcattgaatctgaagcccactggtttacttagactagtgaccaatttcccaagatccccctgtctccaaatccatgactgggatgacagatacgtgccaccatgcctagcttttacatggttgctggggagcacatgcatgcttccatgtttttgagacacagtcttactcttacacagactggtctgaaatacacaatttagcccagtctattccaaactgtggtgcttgtcctatctcaacctagctagtcctgggttttggcaatggtgttatgagtcacactgggcttaaatgtgacttgaaggttctagaaacatccatgaacttataggagtgcttgaatttctctttgccacaaatcactctgcccttgaatagaggggaataaatatcctgggttggactgtggttctcagtggggagggttggggtaggcagcttggtgtgaattgtttccaggcatgttggagaataggtttttttgtttgtttgtttgtttgtttatttgttaagggtactactggcatctaatgggtagacgctaaggatgccattaagcatcccataataaatagaaaagtcagctagaacagaattttctagtaccaaatatccatagtgccacgatgagtaaccatgggttataataactatatttaatatacatgtatgtgcatgtgtgtgtgataataataaagaaaaaggttatttacttgaaagttggggttatgggaagagaccaaaagagagtaattgggaagggctaagggtaaagggaggggagaagtgatgtaattttacttaaattaaaaacattaaaatagaaaaactgtgcctagaagtatatataacaatgggatatcatgtgtatgatctatgttgattatggaaaaatgtgtccatagacatattttcagaaactgtgagttttgtctctctgctgtaacctgaccaccaatagcaccttctttccaaagaaattttcatttacaatccagacaaatctgctgcctagcttttcttccctgtgataggctttcattacacagtcaaggctaatcctccagcctcagcctccggaatgctagaacaccacacccagccatctgatgctttgtgaatttcttcctccaaacatctttttaggcaatccatataggtgtgattgtaacctaaatacaacatcatgtagccacaggaccagactgtattcttttagatattgttattcttgtgcgggtgttttccaaagcatacattcaagttacccatttaactaactagttctgacttaatttggagagctttattagcaaacagtgtaagacaaagtagccggtataatacagagtgatgtttaaattagtttacaatttgcttggtctcatctagaactgccctgaacaaagctattcagaaatgtcagctgtgtccctaacccactgtaacaaattgttgcctgagcgctgcacacctaatgacttcaaattagcttcaccgctatactgcctgacagttcgttacgactgttagcgacatggctggcgtatcatgaccaataaattggtttcagtgtgggctgggaaagggacttccatcaatttgattaaagaaattactgtagcattcaaagcataaagacaaactagtttaagaagacggaaataagttaaccgtgtgtgccagaaaaacatttcttgtcattcgaaaacttctttatgaactatttgaaaataaaagtccaaggaaatgaaatcaagttcagacacaatactaacattttcaaaatatgtggccaggtatattatatattacataatgggtcaaaaaagaaatgtaataaaacactaacttgaaatcagcaaatgggaaaaatccaccatcttagtctatcatttcattttgtatttagattcatcataaatatctgattgcaaattaatgtaaaatttgtgatcataatgagaaaaccaatgcaatatgatatgatatgatatgatatgatatgatatgaaagaacaagatggatgattcttagaagcaaaggggacattagcccagtgctgaaaacaatagtgaaaaatacagaattatcttcatcaggaaaaagataagaattaccactataactaagaaatggttttatggattgtacggtctttatttaatgtgggcaactaatgccttcaaatatgaaatgaatggtgaagagacttcaagacagtgcataggtagaatggttactgctatataatgctctgccacaagacaatgagtactgaattaagtgcaaacaacaaagtgatggttaagaaataataccacaaaaaaggtacattttcctcctatggtgcatataaacctggaggcaactgcagcctttgtgtttcttttgggttttcagagaacttacctggaatatgttttgcccatccaatgataaccaccaactctcggtcagccaagtcacagagtgttgtgagggctttgatgtcgctgtcgggaacagtagggtcaggcatggcatagatcttctctggttcagccaccaacaaatgcgagacaatcttgttatctatggggtcaaaccagagaactacatgatcactaacatagtcacccagtttaacaaaccctaaggtagtttgtgttttggaacataattgtaccagcctccaataaaacacacctgctccatcatagctttctctgtgtgccttaagcagtgtgtaggaaaattcacatcaagaaagaagtcactgttcttgatggaaaacatccctttctttgcctagctttctggaaggaagacttggtcctgccatgagcatttttatagcagacaggtaagagaagttaggtgcttcttgggtttgctctctgatttctaagtgggatctggtgaagcagattgaatagcacacaacagtttcaaaataaaagcctactggaaaactgaaatatggactaatgcagaaagcaaagacccatgagtgcccatagtcttagtaggcacaaaagtcattaattgttttaattcttttgaagaagagctaaaggtcagagcccttctgccaagatgaattaccgactatataactctatttccttgggatgaattaaattggagtttccctccttccctgccgtcccgatgtaccaagccaaccctccaaatacagctaatatctgcacccataaaaaccatcctgcttatacgagacagcattttctcctccaagcaccttattctttaatcttctactttcatctgttgtcctcagttcattctctgcttcagatttatctgtctgaaatttgtgatctatgcttttgaaatcttcataaagtcaacactagagacaaatggaaagcttcccatcggatgtgttttactgctcaggggcatctgagggtttatggacaggctgtaaagcttggctaacagaatgatttttctcgttggcctggttttcaatttctcaatgtagctttagatgtgatttttctctcctatgtgaggagatacaaatgggcaaaaaccaattcacatatttaagagtcctaggtaatatcttttagaaaatcgggagtctaggggagagttttgtggacagagtcaaaatttcaagtgtgtttgttacacattttccttctgctctgtttttaactccttcaagcccaagtgatacatggcattcttttggactgataagtaaggaagagacttattaaagacatacctagcacattttgaaaaaaaaatatgtacatactagaatgttgactagcttgattttattcaggtcttgtgcaggcaaccctgaaatcatattttaaagtgtgccaacatggacatagaaattacatttatttaaaacaatcaccagtccttggcattattattaatatttgggtagtaatactctcaaacaccaccatttctaggttctttggagtgttttttagcttataggatttgaaaagagtgatgcttgcttattttacacagcatgtaagtaacaccttgtatttctggttatgcagggagaggtcttgatttttgttcctctgaagaagctagaacctcaggactagaagaatacacatcagtaaagggcacaagtgtgtaaccaaaggaagttgtgattcttgattttattttatttttttcacacaagggaaaacatacaagctgtgttatccaagtcacgacttcctgacttgcaggtcagagcaattcagcagaagcctggcctttcccatcattcagcaagtagaatagccaacagcactgtttccgggtaagtcttatttaatgtttccctaattagaatcaatacaacccaattttcattcttgggcctttgtagtacacaaacaaacagccaggggtgcagaaatctccccagccaccttcccacaaagcccatagcatcccctgatgcctatctgacaggatctgaaaattaagttttttaaatgtttgttacaaaaacacactaattggatggaccaaggaaaattaacacaatggcctctagataatgagtaacgattcattaggagccctctttatctcagaccaatggagtgccctgcctgcgatcgctgtaatcttcttagaggtactagacaagccacttcccaatttctcaggtttacacagaaaacgatagatgttcctgtgccatgttgattgacaaatggcccggtgctcttttttttttttctttctgtagaggaaattatcaatggtttaggtcaatgtgtgcttaaagggaatgagaaatgggcaatccagatattattgaatcaagaaacactaatgaaattaagcattagtgtttattgcattttattgtattatcagaaagtttttaattataatgtgcaaaatctgcttaatgcactcctagattgtatctgccgaacgccaaactgcttctcgggctgaggaggggttgccagattggacaattgaaggtataatcagcataatgttttctggaaaggcaaagagaaactacgccatatgttcacttatgctttaattttatgtaaaatgggctgcttttcctttaacacagctcaaatgtcgtttcatttacagttcagggtctgctttatttatttaacaggggcccagatgctggcacggatggtgcccagcactgaccccacctggagaattgcaactggaagctgagttgaaagcagatccaaacagcctggcccgtctcttgaacggttgtagaagcaagagtagcttgtggcttctgtgacaaagacagctacatgtgagcattcttgccactcaataacctcttagggcctcttccgaatgccaggcgtaaacatcaagattgctagcttggcggcactgtagctattaactgatttctcagaaaatgggatacagttattgccacaatctacactccagtcccttttagttaatgacaaagagaatggggtttgcattttagctatgcaccagccatcctttcaaattgcaacctggtatcataaaatcatgggctctttaaaagcaatttataacgcccataagggcacctgagatggaaccaccaacctatgctcattattagtaggtcccattctcgttttaatctattgccagctactctgttaaccttatatagttccaaattaatgaggcccctaatgtattttcattgggaggttgagcagccaaactcatttagttagggaaaactacaaaagtcactttcttgtgaaatctgaaactaacagctccaatgaactaatgatcacagtatgatccattttatgtacctctgcaaataaagacaaccagtaaatgtaaaatccacaccatataagctgtgcattaatatgctatgcttctacaagatgacttgggcacaaacaggaagagcagagaaccctcctggatatctttagaagaaaaagttcattagttgcattgccattctcttaacagacaatccctgaaaatagagtccacagcctccaataaaaaggagtttccttggagtcagtagagatgggcatgccaacattagtatacacggtgccaactgtgaggactctgtgtctgggaagccaggcacatctgttgtacttacatggctttttggctggctgcaccagctgagggttcaggtatgggctgttctcagcatctattctgcgcttgtacttctgtcgacccccgcgtactctgtcaagacgtacccctgtggacagagacaggcacgggcttactgttcaggtagttacctcagaacaatcaaacacatcagttgcatctcccacgagtgctaagggaacagatagtggaactgagaatggaccagtgttatgagagaaggcttaaaaaaatgaagctaaatcagaattgtcagtgtttagaaactacggctaccaatggttaggaaatttaaaaggaattttctaccaagccatcaaagttgccatttgtacatcagggcaaaggcacacctccatagacatcaatcaattcaaagaagtttttcttttgttgtagtgtaatggtttctcaagatacacactggtattctgtacctcaccttccatcactcctgaaggctccatgtgtgggatccagtcaacagaaagatggggagctatgcaaccctcctgtgctgcactcatggaactgaatataacaaagagcatctacctgcaggcttgggaaggcaggattgttgcaggctgagacatttctgtattgaaataccaatagatttcccaaagagaacgttatctacaggttgatacactaaagaggaaactaatgtggacaattagggctgctcaattggaataggaagggttttccagaaggtggaatgtcaaatccaccactcccctatctctcctcccaccctgtatatttaatgacaaagcacttcaacccacagaattccatcttcattcttctcaacgttccctactttctttgtgattgtatcaatatttactgaagtttggcacctttcccttctttccctgcttactcagctttatcttctcataattttctcttcaaacctttatccaggattttttccagattacgtgaggtggtctcttttcaatccatctgagatgcagaggacattagtgatagccttgatgtctgcccactaacttcaaccagggaaggacatttaatctgctattattataggtagtaagagaaggcaggggtcggggagactacggcatgcaggaagaagtaaaaaggagagaacactttagtcatctttaaaattgttagaacaaaacagcctgaagaataaacttggattgcttgtatctactgtatgggccttccaatattctttcagggattatcagagaattcatatttccaatgtagttgcacacgtagctgaggaattgtttaaccctatgatatttctatgtgtttacattataaggcatcagtgcttgtgtgcaaatgtggagctcagaggacaactgcaagagttgcttctctctttccaccaggtggattctgcccatggatctcaggttgtcaggcttggtggcaagggatttcactacctgtgcagtctcaccagcccaaagcttgtcagtttctgagaataaagtctgtctaacaagaagcacttaaaaaacttgggagatggctcagccactaatgtggttattactaaagcttgagttggactcctagatgccatgtgaaaacctgagtgtgacagtacacacctgtcaccccagtgctcagagacagacctgagtgtgacaatacacacctgtcaccccagtgctcagaggcagacctgagtgtgacaatacacacctgtaaccccaatgctcagaggcagacctgagtgtgacagtacacacctgtcaccccagtgctcagaggcagacctgagtgtgaaagtacacacctgtcaccccagtgctcagaggcagacttgagtgtgacagtacacacctgtcaccccagtgctcacagatagacctgagtgtgacaatacacacctgtcaccccagttctcagagacacacctgagtgtgacagtacacacctgtcaccccagtgctcagagacagacctgagtgtgacagtacacacctgtcaccccagtgctcagagacagatctgagtgtgacaatatacacctgtaaccccagtgctcagaggcagaccagagtgagacaatacacatctgtaaccccaatgctcagagacagacctgagtgtgacagtacacacctgtcaccccagtgctcacagatagacctgagtgtgacaatacacacctgtcaccccagttctcagagacagacctgagtgtgacaatacacacctgtcaccccagtgctcagagacagacctgagtgtgacaatacacacctgtaaccctggtgctcagaggtagggactggaggagccctgggctcagtggacagccatcctagctaaatcagtgagccccagattcaataagaaaccctggatcaaatactaagctagagtgtgattgaggattggcattggacagtgactcctgccctcttactaagatagaaagtgactgaggactaacattggacattgactcctggcctctacatgggcattccataggtgaatgcacatacacaggaaaatatggacacacatacaccatacacaagaacttggctttcagtgccatgactaggtgtgtattgcctccagctggaccttgaatgaaaacactgagtgtggtcctcttgtgtaggcacctcacctcttttatatatgtgggagtgggtggatggtatgtacattacatggggtccctcttagccaaactagttgcacctatgaagaaaaatgtggtcctgaaaataatgtttattgatcacacacacacacacacacacacacacacacacacacacacacaccacacacacacacacactactgctcagcaatgtcttgtatatgtagagacacactctctaagcagtgtgataaccaccctcactaggcatgcccctttcagttttggaaatggattgtctccatcctttcccctcttggcaggtaagtattttcatcccagacacctacaacgttcatcctacctgtgccacctaaacacccgcccacagtgcacctagttatcacatggtcaagagcatcccaaataccccaggatttcactttttattgtctaaaatgaaaatcgattggacaaagaattcctttatgacttgtgagctttatttatatgacagtggtggggggaagactagatatcgatactcataaagcaagagattaataatcctatatagtaaaacctgacagagactcgatatgcagagcagtgtccctgccaagtttggataacaattaatagcaaaattttctgaagtcaataaaatgttttaaaagatcataataatgtattcatgtgcaaattcattcccagtcaaaagcagtcaaatattaaacttttcgagcatttaaacaacaaagtaaaatatatctactgctgctttttaactttatttccaaacctggggaaaatggccttttatgcacccctggtgggacagtgactgtcatcctgatgacttcctgtagctcactacattcacagggacactccaaccagcactagctccaaatgtcttggcactgcactacaccattcatcaatttattcctttatactgaagcaaaactctgaccaaggagagccagcccttctcacccggatcataattgcaaacacacttagaggcagaagcacaaaggctaatcagaccccaagtagcctctgaatgtgtggcatttttgccttagattattgacaactgattcactcattcatctgagtaaaaacaacgtaacaaattttgggtttcatttcttttgagacatgatctcacttcataccccagactgggaaacaagtaagtccccttctcaacaaaaacaaacagacagtaactaaatatacaaatacattttccttgagttcaggaaacttgtccaatatgaagtagagaattaataattacaacttaacccactgtgtttaaaagtttcaaacaattttagaaaaaaaataataatatttatgatcagtaattgggagagctaggttagttagaacccagcattggcggattcaaaactttccactgaaaataaccatgcctgttttttacacttctatagttttaaataaacaatttctccttagactctacttgtagaatacttttgaaaaaattaaaacatgagggttgtttttgcccctagaaacataaggtgcctatgaaatagcatgtgtgacagaattttgaaattaattaaagtgactagattgctcaagcagagacctttatcttttttaaaaatagataaataaataaataaataaaacattttaatagttggcatttcccacctaccagaacatttcacaaggcttcttcaaggcctgcatgccagtagggagtcacaaattgtacacactgtccaaatttacaaaatggaaagagcaagagtagagcaaggggggaaaatgctgtggagagaatgaacactcaacacagcaaaggggtcgagccaaggtcgcctaagcgggctcatgctaagccagcgtgttatgtccaaatgcaagttttcatgatagtatatagtcaaaaccgaagacaactttcattacgttagtagtgtaaagtcagatggatttcatacatattctttccctttagggaattattaagaataccctcacctacttttctgatttaaagttaagatatttattatgctgttccaaagtaaaggtttactaaaagacattaagggtaagttcccagaaaacttaagaaagaaacaaatgatcacattaaatccaaacaattttgaaataatcattcgaatatattaaacagccagttgtacttggtaaatgttaatggagtggagtcaggaagggccgtgagaaagccaaacttatgagccaaggaccctccctgcactgtctggagccccacccctcccctgcactgtctggaaccccacccctcccctgtactctctggaaccccgccccttccctgcactgtctggaaccccgcccctcccctgcactgtctggaaccctgcccctcccctgcattgtctggaaccctgtcactgtgtgcttcatctgtgcctcgcagcagcgcctctctcctcccctataggaagatatcatgtgacacacccagcacccctctgctggcgcttgatgagggaagcatctatgcagagcacagaggaaactgactctcgcaggagctacagctagaggctggagggagtggcaggggctagcccaggactgggaatgtccatggaagcttctgttggggttctccttggggacaaaatctgggcagctgtgcagatttataggcttcatgggggtgggaaggatgggtggaaattatttgtctgtgcacacaggtactcctgggaaaagccaaccaatcaacctgcttgcagatcatgtaggacaatgtgacaaatcaaccctggatatttttgcttgtttgtttgtttatttgttttttgtaactgtcatcaccctctcaaagaggacagcaatattattacatatggccttgagattgagtccctttctccctgttttaacagcctgactcctggtacctactctcagcactcactgcccacaaattaactcaatgagccagtccatgcctggtgtgtcctgtaagaaataaaagccaaggcagtcactagcctatgccacttcccaagagcttgttaagggctaaacacacacccagggtgaaatgaattctatatatgttagcacacataccctcaaaataaccccatgaggcagttgcaattctgttccattttagaggtgggaaaactatgatgtgtaagggtaagattcaggtgtgagcagggagaatgcctagaccagaggaataaaagcaaactactggagtaaacgatatctgcactctgacctggtgcagattctcggtagcacagtgtccacagaaggaacaggacttctttcattcagttccagtcctggcgactcaactaaatgtttgagcccacagctgtgaacaaacccagtgatgattgtttttaaaaattaaattcaaactattcttttcttctgaggcaaagcaagttatttataaattcccccatgctcctcattccttgtcgaaagggcaccaccaattccacaggtctggctttgccagagcacagaaactaagggacatggcagccaagttttacagttccaacagacaccatggatggcccatattccactatgtggaggctgatgactattgttacttgggatagaatatcaggcccacaagacaggagtgttggaaattgccccatctgtgagtcgaaatactgtaatatgtgacgatgtaagaaacaaagattacaaagggattgaaagatagacagggatggagagacagagagagaaagagagagagagacagagagatataagtccctaaaagagataaaaaaaaagccagggttcacatgaaagctctcttgtcctctagataaatgaacaataatcagggggcaatgcttcctgttggtctccccaatagccatctgaatgattaaaatggaaagcttgccctggaaacggcatacccttttatgtgcatgcagcatcatatgtgggctaatgcgcacaggacaacaccccccccccagaagctcctagatccctagatctctgaggtggagaccacagttcttggctggctctagggctcttgcgccaaagttataccccagactgaagcccagctgcaaagggcatgaactggaaatcacaatccatgcgatgcccagcagggaaaatgttttcttagccaaggtgaagtttcttgtgtgaagcatggaggcctaatccatgacacacacaagtacaaatcaggtcacctgcaacaggtgacatgttttaattgaatggcttctgtctgcaattctgacaaaaggggaatggaaataaatgagtctggcaagacagccctgagcctcacaatacccgatatctcattatttttaaacagctatctataaactaacaccgacaagctctgagccttttatttctgctcaggctgaggtttctgtgaagggggaaaataaaaggcaagaagagaaaggggcatccagaacactgcattaaacatgcaatacctaccattatcacctccccagtgtaattagagaaatctcctgttcaaaaggcactatttcttcctctcctctgtcaggggcgtgcacgcttgcttggcccgcacttgttaaacataggggctgtctttaaagaacagaagaaaatcttccttttacttctgtgtgtttctttttctggtgtgcatgtgtaatttgtggtatgtgcacatatatggggggggtgcctgtgctggaggctggagaacattccagaggtctctgtcagtctccaccttattattcccgttgatatcggtctctcactgagactgaagcttggctgtaagcagctgtcctccacctccctttcctcacagcccccagcagcactctggttgcaggcgtattcactaatggccacaacagtctctttttctgaaaggcttgtattatgtagcttaggctagtctgaaactcaccatgaggaacaagctggcctttcctttttatcttaaaaaaaaatccatattactgtagtgcatgtagtctatcaaagtatattttatctcagtttaaggctgatagctctttgtattttagaaattaccatttcctgccaataaagttatgaggtaatgggcacaaatataaaatagaatgggtccatcaaaaacagtgattccactaatccacactaagtgtgatgctagaaggagtatgtttttacacaacagtgctcctcacagtgcagagaaccagtgagcccactctgcaggaggtgggaagaaaggatgaatgccactggcattcttgataagtctttataaaatatatagattagtgattatggttgatacttaagacagagctagcaaataagaaatcctagtcattggccagcagcattgtaactaatattaatctctctgtgttatttgggggccttaacatggtggtgaaaatcaggcggctggcagaaagagttatcgttacaacagaacaaatctggagactgagggtgcagtgcgtctggtccagtgcttggtgttgttcatgaagtcccacgcataactcgcacaccacataaatcagggctggggcacttcagagacacagggttgtttgggtgtaattcatatgggtcagtgaaagaagaaacaggcactctagggtgatccttagcctttccagctgtgcagacaaaaggatcagaagttcataatcatcctatactaagttcaaggctatactggcctatatgagtccttgttagagacatagatagatagatagatagatagatagatagatagatagatagatagatagatagatagaaataaaaataaaatctaccacaaaatatatcatgaaattgtctatattcttgggttctgtgtaatgaaaactctacccaatacataaaatacagaggaaaaaccagttaaatagcaattaaaagtctacataatgttagcatacacatctccaaatgtcataggagtgtcagatttcttgtggcacaattagaaacaatggcatgtttctaatcccttgtgacattggcagcaagaagtttaacacgataataatagtaaaggcattcacaaaacctcatggggatagccagcaaacgaaagcaacaaaatgatgctgagtcaaatcttaaaggcaaagataaactaaatacgaagttaaatctcaataccatccaaagataaactagatatgaagttcagatgacattcaagttgctgggttgaaccacagtcaacctggttatagaggaggaagggagtagagtttcaaggtcccattgttggcccttcagtggaaaaaaaggaaaataatgaaggagacaaagagatgctctattgcatgttacttggagaaacataacagtgccctccgtgaccctggacagacagaccactcccaagccctctctattaccatgaagaggttagatatttctgaggggagttaggagagagaaaagagagagaggaaacattacaaaaggtgtaggtgcagaaattcagagctgagaagaaaggtacccaggaaccagggggcaccctttgctagaggcagccttgtctacagagatgggcagcttctagcaaacactctgagacacctagttatatatgtttccctgtaggggaaccaatgctggatttagaggtggatttggctttccttctctaaaatccaagcacgttatttaactaaactttagtgtttctgtgttgtatcaagaagccaattgatgtaatacagaataaaagaagaatttagggactgttttgttatgctcccatggttgcattccccagcatgtgtacatacacaagcaaacatttctctgctgactgtttatgtttgagtcccacacagccaatgaagacctgcctgacagcaatccctggacaccctggaaagaaaatgggccacacctcctcgactgtactggatccaacttgctccatttcaacggacactctggccagaggttcaggtactgacttcaatcaagttgaggatttcaagcaagatcttcaatcaagcaaatcccatctaacatggactggatacaatccattcaagactttcactacactaacattttcttcctacaggaccccacaaggctatcgccatcccatttcagcaggaagtaacttggagaatgctacatcccctttccccattgttgtcacttaggatagtgtgtatgcatagttaggggtagcttcctattgtttatggttgggattggaaggaggtgttcaggtttggacacctctttcagatgactttagggtttagttaataaatagatagttaggatgtaacataagcagattgttgtatcttcttatattttacctttatgattgttaattttggatactttacagttaagttttaatcctcttttagactaaaagggcaattgtaggggaagctgtagccacacctacttaggggctggctacaagtgtgcctgacctcgatttcgagggcatggtcagggtgacgtagagcgatacttgcatgggactgcgggctctcttttggtttcactttggtacttttggtacagactgctgccacgccagctggctaggttgctctgtaagtaaagcttttccctattaaatacccttatatttctacctgactccgtattggtaatttcccactatgtttccctccccaaaaattgattgattttgatgttaaggacttaagaagagggtaggagaattgtgaggcatagcgataattaaaaatcacacatatatgtacatatatgtcaataaacaaaaatgtcacgcactaaacaagatctgtttccactacagctcatttctattcactatcttttgatctcttacatatttgtggaatctaggttctatatgatttcaataaatagctaaaaattcagtttgtttgacatagatgaaattcacacaaggaggcattatgtttttacatcttatgttcatgttaaatgagtatccatgactttttcttcagatttttttatttgaattagaaacaagattgtttgacatgacaattccagttcccttctccctcctgtcctcccctaccacccccccaactaaaaccctacccatcacatatcctttcttctaatctatacctgactcaacctttctgctccctcatgacctctgcatccttccttttcttccctcctcattcttgtagctccctcccgcctcttcccatgctcccaatttgctcagggattcctgaccctgtccccttctccaggggaccatgtatgtctctcttagggccctccttgtttactagcttccctggcagtatggattttcttaataagaaatgatttcagatccaatcttaattgtcataaaatgttagagataattgaaagagttataaataattctgaacaataaaattaaatgtcctgtcaaaaacaaccatatctggaaagtccgtactctttaaggtgagtatttaggctgagcatggtggcacaggttaaagttctcagcatttgggaggttacgcaggaaaatgtcaaattcaaaccaagcctgagtgtatgccacagcacccgaggaacaaaaaaagaatggggagaggagaggagggaagagagaagagggggaacggaagggaggggagataggcggagagggatgcaggaagggagggaaaggggaattgtcttcaagtacttctgcgggtatttagaagtaccttgtattttgagtggaccatttggacttttatagaaaacacacgtggtgtgtgcagagtctaaacacctgagactccaggaggaggtgcatcaagcaggggatttcttgacagatgtcctttgggtacttgtcatgggacttcattcaaaggacccacaatgtggggagtaggctttaggttctagcaagaaccatgaacagaacagctcaaggccagctgagtcaaagccctagctgtcactattgtatgtagggagaggtagaatttccctgtggttttccaaaccagttttctttctatcctattggtcaagtgttcctctctgtgtatctgaaacacagcctggccccaaaacagactttaatacattctactgttatatatattcagctgaattccacacactacttgaaactggattaaaggattaaaaatacagccaaatgattttgttgcatgttttaactgtatattaacattagcgaatttgccatgttgatcacacacttattctgaaggaagacccaaaagcactgaaaaggcaaacaaatacatttatgtatcatttattaatcaggtgtttttatctgcttggttggttcattttgtatttctccagttagaatgtacacacaaaacatatatggatctctttgcaattatgtatgtccacagtcctcacttgctgtttttcttagggtgctagtgtattatactttaaaagataggaaaacatgaaggtcccaaaatgaagtaaacacaaaaagaaggaggaaaaggagatggttgcaaggtagaatgtcacagtttaatatttcaccattcttcccagacactgtaaaaggaaacaggagttgatctgccaagggggtttcagtcggatctccacatgagaattatatttagaagatattgaaagtgaaacaggaaagaccaggcatccctggactctgggcatttgacaaataaaaaaaaaattctcttcccaagacacttttattgccttcctgcctggaaacagatgaatgaatagggccacgtggtaagctctcttccagttccaagtgtctatgaatgaaatacttaagaagatggaagtgacccacagatttggagtctgacaagtgcctgggcagctggatacataacatactttatatcctcaatcagggaagattggagccaaatggacaatgttagtgaagccgacagcagaaggcttgctggcacaggccttagtgcctctcacactgaccttggccaaatgcatttccctttgttctcaccgataatagagcaaataaaatacccgtttgaaaaatgcttgcagcttattgctgcattaggaaaagatcaatgcccactgcacatggaggaggagaggctgaaactagagattacagacagccttgggtttgctaccacatctgggttaagctaagcagaagacatacggactgactgggtgtagctaagcagaagacatatggactgactgggtgtagctgagcagaagaggaacaggtagtgggtactctgaaagccacatgacaactggagagagctctgtctctgaactaaacagcacctaatctgcatgatgaaaagcatgtatgaaatatgacatattccattaaatatatcacaaatataaatgttgcatctcatcatgcacagttgtccagaaattctggtatgtgtgtgtagatgtggacacacacccaatgaccacgggtacatgttccaagattactggtgaatgttaacagcccagacagcactaaactctacatgaactgtacccccatcacacacacgtgcgcgcgcgtgcgcgcgcgcacacacacacacacacacacacacacacacacacacacacacttatggccttttccattttcactgagctctcatacacagtgcctctaatttttggtttgaggttagagaaaaattagtgcgatttctaaacccttctttatgacagtatggatcaagggtttcttcttactatacaccttggtcacctcagcaagctttaccatttcctaaaccatagaaggaagaaacatatgggctctatgcagcacagccatgctgtaggcatcgctcctcttataagttaggtatgttattaggaaaaataaggggacctgagcacaagtgctctctaatcatcacactccagttgaggccttagtcagctgattggtagcttgggggtatagacaccatgggcatgctgggaaagggaagcaccacacttggggaagagggagcagacatcctgagattccatcatgctcatctgaagggaaaatagtttaaaatgtaccagctctttatttccagaatcttccatttactatttttggactgcagtgtactcttcaggttagggggactactgcatacttacacatagatatgctgatatagattatgcaggaacaaatgtttccaatcaatacaatattatttatttttctttctgttctaataattgcatggcctgatcaaggatgtctaagaactattcatttgtaaagtacttcctcaaaagagaactctctctccatatataaaaaagtagtggccactctgcttctttccataaagctcatacatttctagctgatgatgtagctttgggctgccaggtcaccatttataacttctgatgtccatggagttagaagaagccaactgctggaacttccctgatggaagccaagtgtgacaactggttgtttaaactaatcacattatatgttggtagcgatttagaaattatccttgaatttcacttattccctcattatgtaaaagtgcaaattaaatgacccaattgctcaagctgtcctaatagactacaacacaaaactccaattttaaaatcttatttagtaggctttcagtccaatgtcaatggaaaagggttttggttagaactcatttctaacaaggttataagtttaatcacaccccaccctagcacctgtcagttaaaagtgctgacatgctttggtccaaacacactctcttaaagagattccctttggaaatccccacagccgtttatagagaatagtgacaaggactttcttaaatccatcatgtttactcaatgtttccatctttcaaagaattaggtgtcttcccagagaaatatgttggaactgcaggtcagttcctggtgtctcaaatgtctattgtcactaggctctacaaaggtatcaatgacagtcagttggtggccgtttgctggcccttcttccattacaggaagaggacttccaggctcagaacagtaggaccatgctgtggactttttagacagtccacatgaggaaggaggcactggcctttagggctggggagatggagacaggtgtagagtattggctccatgtttagttcacagcacccatagggctgctcataaccataggcaactctagctccagcaagtctgatgccctctgctggcctccaaaggcaccagccacacacatggtgcacattcatgcatgcagtcaaacactcatatatacaaaataaaaaaatttttaagaattggaacttaggaattaaaggtgctttctttgggttagggaatcattagctacaaagtggcagaaggggttgctaggataactctgaaggacagtaaatgtgacaatcagtgacagcagcatggaggagcattgaactttcaaagtttaagtgttctttttaagagaagtgaaatactgaaagaaggtgggaaaactcaactttctactattttctagtttatgaaggcacattatgaaaacctttccctatgcaaaagtaacacatcacataattgaacatgagtcataagacactggatatttggacatttcctatactcagatagcatcagatccggtgcagccaggattagtgtgtctacacatgtgtatgtgtgtgcttgtgtgcgtgcttgtgtgggtgttcgtgtgcatgtgtgcatgtgttttttttcctgtgcatgtatgcatgtgtgtgtgcttgtgtgtgtgtgtgtgtgtttgtgttaatgtgtatgtatgtgtgcgtgcttccgtgtgtgtgtgtgtgtgtgtgtgtgtgtgtgtgtgtgtgtgtgtgcgcgcgcgcgcgcgctaattagcaaaagacaggagacaaccatgaatctctactgaaagaagtattttcttcacaacctctgttgatcctgcaacatgggcttccacaacagaaacaccggattcttgtcaagcacagatttcagacatttactttttctaaggcactcaactttactgccacaaagagaactgcaaggaatgcctccgcccccaccctggaagcttcggcagtgtcctaatccatcacaaaggtcactgctgggcagtatgaggcctctgctccatctactgggccttcatggctggcctctcagcacgtggaatccctgttggccttagaaatgaaagaccgtgaaattgaacccacggaaccagaaggcagatcaagagcacacaacactggtctaccatgcttaagactggaaaaagtataacacttgtattttttttcaaaagttttaaatgaccctatgtcttggtttattcatgcatttaagctcaccctaaagttgacagcagagctgagagcttgggtgtttggggatggagttagcataaaagctgttcttaccctcatccattgactcctccatttgtctcatcaatttagctcatgtaaatataatattgctatatgagtaatcaaattagctctttctaaaatgctttcacataaacctacatacttttggggagaagctgtttttactattccagattttaaataattcacaagaaataatttaaaatgtcctgctgttcctttcactttgtgtgtgtgtgtgtgtgtgtgtgtgtgtgtgtgtgtgtgatatgcatatgtacctgtgtgtgcacctgtgtgtgcaagtgtgagagagacgaggccaacagcaggtgtgttttcttgccgtgtcagtgaatgtggagctccctgactggctggactgccaccacctctgccggtgagctctagaaatctatgtatcaaggaaccacacttttccagcatgaagttacacatgcacaccactccttcatgaccagctgaccagcttttatgtgggtacaggggacagagagtcaggatcctgttcttgaaaaggaagcactgtccttttgagccatcttcccagtctaagcctttaaaagtttttgtgtcttcgttaacagatgcaggtgagtcaagcccactgtgggcagaccatctctaggcatgtggtcctggtatgcatagaaagttaatataaatttgagtgagtgagctggcaagcagcattcctggatggtttctgcttcaagttactgtttgaattcttgctttcacctccctcaatgatggactgcaacctgcccatttctcccctaagctgtttttgttattggttttagtcacatcaacagaaaggaagctagacccccagtgatgtggtattgaaaatgggaaaaaactgagttggcctgaaggatatcaacatgtactggtgagatattagcattagctattgtctacatcctattaaatgcccagatttcatggtaccaagtaatcgtgtaaaaaaatcctttgaaaataagaatgaagataaaaatgtttgaaatcgttttaatcattcattcatatgagattgtttatttatcaatgtccgtgactctaaaataagaaaaaaaaagggttgcatatgatataagtaggagtcagaaatagagattaaaagcatctagaaaaagaacactactttgtattttcccaaagatgagataggaagaaatataaaatgaagaatatagaataagcttttcaaatttatgttaagttccatttagcaagctagcaacatactctaaagtgtggcacagagaagtttaataaagaattgcgctaaagtagcattctctctaaattgaattctttttaactaaacaggaataaaatgttgtttatttaacagaaaatgaattggagtgatttcagtttagaatacaatattgcaaatagtgtattttaaatcatcaaggagtcaaacacacagtgagtgagttaatatgtacaagtatattgactgattaaattggagaaaaaacagtctttgaggagacatagtctcaaaatgaggatgtgatatttatagctaacatcgttgcaattgatgcttgtagacagtcattcatgctatcaatactcaccccacactcttgtgaagagctcccacaaaaagcaagcccacataccacaagttctccaagcctaagggaaaatctgatacaaagtgtgtgaatgaagcttttagacctaataaatgttctttacagtgacattcagcaagtaacaatattccatttcttgtgaataaaatgcaaaagtgtacagacaaccaatagctatagtaatactctttctaagaagttaaaaacttacagctatttcattttttctagtgctcttcaactcacctctgggacttcctggatcattatagattttctaagacttagaaatgacatatttttttttaaaaaaattgagatatttggaaacagactgctaaagtaatgtttgccatgggtatttaactgaatttttaaaaaagaaaacaatagttcatgttttattttaaataaagcttaacacatgtctatggaaaaaggacagacaatgttcttactatttagggagcatctattaagagcaatcatacatctatgtcaacttctatttatacaagatgattgcctaagtaagtggggctttcaaaccctccctcagttagtacccccatcacattaaaaggacaatttatcatgcttgcaagttccatagccattctccaaacacacctgtgtgatgaatgagagtttaatgaacaatatcatatgcttggtacctcagcataaactaagcattataaatctctcgtgcacccacagtaactgaagagagaaataattgtatttaattttaaaatagacatgtattctggagaattctgagacccatcatttttgaaagaagtatgatctatttcacagtcaataatgctatttctaatcaatgcttagaaccaaatgcgaattgcattttttcaaactctagtcaagagtgacagagatagttcagcagttaagagcattcattgctattgcaggggacctgtgtttagttcccagcacccatggaatgtgagttctacgttagagactatgactctggctctggggagatagacatgaagtcttggcctccgtgggcatctgccctgaggtgtccatatccacacacaatagacactcactcacatacttaaaacaataaaaggaaacaatacaaaacagtctggtgcatttaggaatagataaatattctatattttgactacaatatgtgaccaactccaactccaaatggtttcttgtctttttgagattataatatggtattatttcccctttccccttactccctgaaaaccctctgatatacgcctccttgctctcttctgaattttgagaagaaagcagatgtaattttatcattatctgctagagaagcatttttttggggggagaaagagttaatgaattacagacctgaaagcagcgttcatggatagtctgaaatttccttctaagagttagagtgggtgtctatcaagtgcttatgagaacaaatttatggaaaataactaagagtaaagctttgttcttattaagaaacatgaatatgtatgtaattttagccagactaaattaacccaaaaatgaataaataaaaaaataaggacaataattgttttcacaagagaaggatttgcctcccttcccccttttgctttgtagtttcaaaaaataattcacattttaaaataaaactgtttggaaggaaacaaaaggaaaataatttgtaaagaactcaccaagtatcaggaaccctatacagcccaacacacagatccatgtatacacacacacacacacatacacacacaccacatacacacgtggcaataagcactgtaagtagggatagtctgtaggctaaacagtgtttgatgtgagcatagtgcatgaaaatgactgtctgtgcatgcactacgttgctgaggggcgtgtctgtttccgagctcactgataaggttatactgagcctcattctaatttcatactatacacattttcaagttacaggagttggaacttggatcaaatcccacattttgttttgtttgttttgtttttatcagtgacagtagaaacaggcaacatatcacagctacgtgcatccctctgtgcctttgcaggcatggcatgttaacatgttctccatagctaaccctcaatcatcattgagaaccagcagcaataaatatatgaattatacctgtggttccactttcgttttcaatctgatggcttaattttattgaaagccactgatcgttagggcttttttttttaatcagaggaaattggtatttgggttttggcaggcttgcaaattattttgttcttacagctctcatccccttggactcctggttcttctacacccttttgatatcaccaagtcagagagcaaagagctacccttaaacagcagacaattcaatctggaatacttcctttaatgaatttattgttatgaattaattcaagcctgtcatctgcataaatatatacctatagctttaatgctttttgtcttcctgtgaactcatatgtattaatggcctccatttctgactttggaacagagttgatgatgacgtgaaagcaactagttaatggcagcacatttcttggacttcaatcataactcaggaccatcagtttagcactattacctactaccaggtttgtcgtctcagggagcttgggaaagatactgtcagggcactgcatttgctttcctagtttcgagcctctttatatcaacatagagaagacaacttgggacagcttactcgacaaagggatacttccctaacagctggagtcctacaacttggatcccagagcccaagttaatgtggtgaccacctgtaatcaatgaggaggtagaagcagaggagcttccaaactcactagtgagtctagctagaactgataaggtctgggttcagcaaaggaccatgccataagagcaatcatgtaagagacataatgtcggctctgggcctccaaatgcacatgcacatgcacacactgaatgcataccacactcttttactgacacctagccattgcttggtgacaatgtgctattccattttcacaaaatgtcaaacaagccaaccctggtatcttaagacaatgtatgatctttgtctttggttcctgattcaacaatccttgcaattttgcaagtgaggaagacggatggactctcttttaagttccactgagatggacttggtgggcttctggatggcctcagaatggggtctggcctctagaaacagcaaacatttattagaaccttggaattctcagcccctgccttccaaatgtccatggaagggagtgaggaaagactcagttaatcacaggtggccaatgactaactctattacgtctatgacactaaggatccataacagccaatgaaacaatgaggttcaagaagcttctgaattggactacattgtgagggggcacatgcagaaagaggatggggctctttgctcctgttagccagtggaccagagccatgaatttgtaggagtgcattcagacagttataactaaaacaaattcctgactaccttctggcatgcaatcagagaactagtttcattattggaaaagaccttaccatggcaaaacccaaatattttctggacctcagtttcttaggatcagttcacaccatgaaaataaaggtacttagagggatttctgaagttagaagcatacaaaataaacaaatccacgtttgtgtaccagaaaaacaaggaaataaagcaggaatggcataggcatatcaagaaataaataagccatcgagaaggggtttccattaggcaagtctgggataaactgggcattaaaatcaatgacagcaatggattataactcagtgaataaaatagaaatccacaagtccacatcaccatatgtaaacacacaagtaaacttatggagtggaataatgacttcaattcaaattaacacactgaagacatctttagtatctgaaacaggcaagcaccatttcacagtggaaaatgcctggttcacagcctggacacagggaggagacagatgccattggagatgagaaaggccagttgagtgtcccctgacatgatgtagtcagatcaatgagtcagccctatgatggagctgacaaccaagcaccatatgaatctcatgaagcaacatcttaagaatacacctaagaatgctgcaaaatcactgatagtctttaaaactatcagtcatgaaagtcagtgaaagaatataggttcaagcggaaacacacattctgtggcaatggcaatacattgatcttggagtttctggcagcctttgacagttttgtctttctcatcctctcctgggcttatacgtttcctgtatttaattctctccttctgccaaatactccaaaatgttagatttatctggaatcaattatactgaaacaccttcttgtcctccaatggatcttgatggctttttaattttttcaacaccctcaacctatattatctattggtattaatgaccccgggatttactagagtttcaggatggtgctaccatcctgagacaacctgccagaggaattaatatgaagcaaatttgcagactacttttcagtttacgaagcacttcagctattttatctcattttcatttagcatctctgggcaggtggaggatgtctctcatctcaccactgaggaatatggaacaggtcccatcctctatagacagtgtgggttgaagcaaacccttctaagttcagaagggcatgcttccttcctcaccagcaaacacccactttccagtgtcacagagagggagaaatcaatgaggggaacagtgccctgaaataagttgccattgtacacactgagcaatgggaatgagtaacagtcacacaccacctccattaaggcgtgcaagactgctatctatcttcttcattgttgttctgcttcttaacaaaaatggatggtgcctgattgttagttgtgtattggaggtgggttagaagtgaaaagaacagaaaagaaatgaacaaaatcaatgggagttggtggtgaattccatatatttgaaactcaactttactgtttttaattaaatagaaatacagactcattgttttaaggacattaaaaagacaattaaaacctgacttcataagccccaaacacaccccaaatccatcttttcaatgtggaatgccctcaacaaccggccaaccacagttttagaagattagattctgttaagaactgcttgtagttaactgcctgtattccaattacttctctgaaaacccgactaattacaagcctgccactctgcactctcccgtgaagtttagatagtttctccggagtttcaagtatttgatagagtggcagacataaactcaaagggaaataaaatgagtctgaacatatccccagtgataattttagaactcattcagtgtacacacatggatatttaatagtatcctggatcccacaacatcagcaacgtttcttccaaatggtccaaggaagcagacaagagagactgacttcacattcataggtttacactctgctcctccctccaccaatttccatatatactgtttgcatgtaacgtgaagtgaaaaatgatctatccatgtgtctgtctgtctgtcaactctctatcatctatctacctatcatcacctactgatctatcgtctatcaatcaagcaattatttatcatttatcaatctcttgcatcacatatgcatatgtattatataaatatgtgctaatgcatacattttattatatgttagtataatatataatatatacacatagtataaaatagtgatataatacacttacatatatgttctgaatgtaattatatatcacatataacattcttatgttaatgtatcttatataatttgtatttgagatacataatatgatattataattactaatataacaataaaaatgatattataattactaatataacaataagctatgtgaatataattagtggaatataatgtaataatatattacattaacctgtacccaaggcacatgataaccaaaggagaggatgcttgtctctagaacactaccccaccaactcatactaataatttaatccgcattacagatatacttttccatcctttacactttcactttttaatttccctcatttctagaaaacaatgaatttttaaaatatttgtagctatctaagtattgggatatgttgaggcttgcaaaatgtgcattgctcttatcagcccaattatgcagccatctaacctggaagaaagaccttccccaaatatcttcttttgccccaactttccaaggagggcctccaccttcacctcactggtagacagaagtctcggttttctagaagcacctactaatgtctgagcactctagttacaatgtatcaatgctcacacagggactggtgagagttggaacacatctctcatctctaatgtccttgtccttcccttgtgcagttcacttacaccactggatcacttctccccttcctgtagagtgagtgctggaagttttaagggtggtggtggtaggtgcctggcacagagcaaacacatagcacacctgaattttctaggatgctgtagaactccgtccgaaaaaaaaatgctcagatgaaggcaagaactgtcaggcaaggggcttatgaggggctttaggtgacagtagcacctttgcagggaaagtattttggggcctgtcaccttctagcatctgtcatataaccataggcagctgctgaacccttcattctgggagtagaacacagatctggaagatgatttcatcagaccctctaaggaaggccctaggaggacctgtgtgcaagtgggtagtctatttcccaagtgtggaatacagaaagccaaatgtttggctctccacattcgaaaggggtgtggttaaaatcagtattctatggcacatgctaaaatatcttttaatgatagtgaacatgccttgtgcttttcaaggttgctgtgactacctggaagggcttcaatgagtgtcaaatgctctagactgaaaagcacctggtcccctcatctgagtgagttgggttagctagcaaaaatgacggggccttcagacaaaatagactaagctgtgatatgggacctcgggttctatcctcacatagtcagtactagttggatttgtttgcttggtcacttggcaccatgacggaatgtgctgagcaatatggacaacaagaaggaactggattgtaggatcagattatattctggaagtattttctcaaagagctttaaacaccataaatctcctgtaacaagtgtcaaaaggagaaaatgtcagtttctcagaaagatgtagcagacatctcatatctcttatgctcttagcatcttctcttcatttctggagacaaataaattctgagagcgtccaattaactgtctattcaagcgcaactaggaaaaatgcaagccattcctggctgttgccttcaaccccctactctgtaacaatgctgattgtatgcacaaactctctcaaagcccttgagatcaagagtcaattttactgtctatagtgctgggttatggaaacaattacacaaaaacatcagtgacacccctatcaacacacgtctaccttgagtagaaaaaaaaaatggcgggactccagcaataaaaaccagcatccagttggatatttttagcagtgtgggagaaaagacaaggattgcctcttacgtttcataaactagaattggacttggggtgcctcaaagccaattcccatagcactcggggagcacaactcagccctcttcaatggcctccattcaatacaagcctcatccctggggtcagctggctcacagagaaaggcagatgagaaacaacataaaacacgattactgctctagttctccctaaatggtccaggtagccgccactttgccctgtgtaccctgcatcccattactgcccaaagtaataaagacttctgtcacctcacaagctttcatcttcagggctctcttctcttctcctgataagactgccaactctactctctgcaaatgagctcctgtgaacgctttcagtgtgtgtggacaacagtgtggggagttgggcagcatccaagctgctctgtctgtgtggtgctctgtctgcaaagtcagagatgcttaaaggggatcggaactgatctgggagaaattgcctaggagggggagcttgaaattgagccacaagttgcctctactagcctcactttgattttacaatacttgaagatttgtaagtatcggggagagaccacactaattatctctttacagatttctgtttgtgaacattaaacatttacagacctaggccagcagcactagccaatattagcactccatgtatgtgggagctgagcatgtcatgtgtgggacagatggcagaaccatcgcaaagcagtcaattctgaagtaagcgaattgcagcttgggcttcccagtccaaagaatcactaaattcaatttttttgcaatcagtggcatatgtttgcatctgtctacaatatgacttggactaaaactgatctggccatggcatcctgaggactaaggctagacaatcccttgtgttaaactgcttgtgaacaccagagggggataggttgactaattcagtttgtgtgagcatggggtggggaagcacattttgcatatctgtcatgtttgcagtaacaggagcagctgccaaacagtcaggggattttctgtttctaacatgtctaaagtttgaaaacagcaaataatagtaatttaataacgatgttagaggtaagagaccacttgtttagcgtgtacaaagacacgggcttaaactccatcagcaccgagaggcaacataaataaataaataacagtagtgcgcactgtggctctgacactgtcccaaacatgttctctatgtgttttcactaagatcaaggacaaaggctgtgttagagggacacacggacttctggaaggaaatatttgatggaattattcctttatattgtttcagaaccctagaaacaaggaactgggaagagagaaccatggtgtgactcctcctggcagcaaaacaagctgtaagcacattctttgggatctgaactgactgtggctgctgcatggacacacaaataactcaagaaaatgccaatggacgccagaataccttgtaaataaggaactgtcaagagtttaaaattaaatagttagagccaaaaaggccaataaaaatctctttagttagggctggatcaattaagagcacttgttgctcttgcaaagaaactgagttcagttcccagcacctatgtggcgcctcatgaccatgtgtaacacacaacccagggaatccaatgccctcttctggccatccaaggcactgtctgcacatggtacatagacatatgtgtgggcaaaacacccatttacaaaaaataaaaaacaggtctctttggttgcactactggggaaagttttacatacagttcccaatgacaagcacagaaggaacattgctcacacagaaacctcagcgtgtcagcctaagaaatataaactacaatggtgatggattcttgagtgtcctgcagtctcgctgagatggagaattaagagggtcatttgtctgcccaagtccatatgcttttttgttttgatgggaagggcttgtagctcagcaacccaaacatttagagccatgctgaactgcacagaaaatgagtgaaatatctttcctcttttttggctcaatctgactccagttcagatggcctgggacctgaagtgtccccaagatgctctataaaactacaatgctttgttataatttcctgcctcaatgggtgaaagcagtgacttgaatgccagctgtgtacagagaaagggtgtggcatcaagaactcacaatccagatacccagagcttttacaggacaggaaccagtcatcaaggaggaactcggacaacagtgtgagaggaaggagcagccagggtctcaataaggtgacaaacgggaccctgagtgtgagaactggggtgactcaagatctagagaatagtactgagtgaacagagttacaggcagaaatgtgaaggcaaagagcaaagtggcaaaatcgcaggcttggacatcagaacaaattcacaagtgaaggttttaataagttggaaagaaccataagggctcaagtagatttaagcacaaactcgttcattagatcttccaaaagataatggaatctcaagagattgtgtgtcctatgttctataacatgaaacagaactctgtgacttaatgtttgtgtgtgtgcatgcacacaagtatgtatatatataatatataatatacacatatataaactaaaaatgtgtgcatatgtaaatatatacatgcatatttgtatatccatatatgttcatatatatatatatatatatatatatatatgtgtgcgtgtgttgtatctgtatgtgtatatatgtagagagagagagagaaagagagagaggaggggatgtacagcatatgttcttagaaactgcactttccttggaattttttaaaactactatttacccatttctgatataattaatggggtgtttataatgcttaatgctgaaaatcctccaatttaatttttaaaatgaattatttcacttaataaggaaaaaaatcctctcgactttgcccgagctccacaattcgccaagtctcccatatttccagctattagccttttcttacaaagagccacttaataatgttcactctaacagcctcatttattttccagaaaattaactcagtttcaaccctgattaatgatttcatctaaatgaatcaaattaaaaattgaaaattatatttcaaaagccaaaggaaaaaaaattgaccatttccagttaacaaatgatcctttcaaatattaaaagatgaccatggagagagtgtggtggtaatgggatctgactcaggcctgctgcttatctgcagttcctggaggagaattgaggggagagagagaaagggaagaaaggaaggaaaaaggccccctttgcagacttaaccccgagagccctcgggatgccacaggacttcacataggttttgcttgccatcagtgttccaaaataatatgagcatttcctgctggtggaagttggcagggctggagaacacctcagtagcaggtgggaacaggccccgttaacaaagcctaaactgtgggagaaggtgatgcaatgttgtctgagatgcaaacagctcataaggaaaacggggggcccccacacccccatgtgtatgtatgtgtgtgtgtctatctgttgtgtgtgtgtatctgtcatacttgtgtgtgtgtctgtctgttgtgtgtgtgtgtatctgtcacatttgcctgtgtgcctgttgtgtttgtgtgtgtctgtcatgcatatgtgtgtgtctgtcgcgcgcgcgcctgtgtgtgtgtgtgtgtgtgtgtgtgtgtgtgtgtgtgtggtggacaacttttgggaactggcttcttcaagagtaagttgtgggaatcaaattcatggttggcatactcatttaaccactgggccatccagctggccctgatattattttttataatccactatcatccagtgtttacaggtgaatgggaatgaaaaagcagaggataaggttttgctgttagtgaacccactctgagaaagactgtagagacagacacacatccttgtatgctgtttaaacagcccagcatgcaccaccacaatgcaccacaccacacagaactctaccatgaaccacatggctctctacagaccgtttgtttgtagccactgtactatcttggaggaagttgatgatgggagggcataggttattgaactttctattcttctttgctatgaatataaaactgattcaaaataaaggaacaaaaagatgacagaatccaaaaatcaaagagagagagggagagagacaaatttgactttggggtctgcagattgactgttgttatcccaagtcctatgaaagatgttcaggagcatggatggtgttcattttgaccagatttcttactcaagtcaattcattaagagcagctaatgagctggatatggtgccacacacctttaatcccaacactcaggagatagaggcaagtggacctctatgagtttgagtctggtccacgtagagttccaggacagccagagttacatagtgagactctgtctgaaatagatggatggatgggtgcatggatgggtggtggatgggctgatggatgaatggatagataatggataatggaaagaaaagaagccatcaaagaatgactggcctcaaagccagtcacagaaagcaaagaacttcctggtaggctgcattctgtccttcacctggcctctgccctaccctttctcccttaaacaccttacctcagcctgtgaagaagggaaagctgcctctgcactccttccagttcttttgtaggacttggcactgccagaggccctgaacaaactctttccatccctgtctgtgtgcatggggcatggggatggttagagatgctgcgatgggtaggattttaggctgtcagtcccaacttgcagccacctccatgctgctcagggaacctggcaggcagaaagccagggctctgcttgcacaatgggctgctagttggaagacactcaatgtgaggaaaatctagttggcagccagcagtactctgagcctcccagcagctccctctaaggatttccagaaacttccttggtttgtcagggagggcactatgtgcaatagctcaggccagtgtccaaacaagaaggccccaatagccagagagggaatctcccagagaattaggccaaaactccatggatacacaagagggtatattatttaaaacaatgactaaggaggtattcatcactatgagttgctttgttataacagacaaaaaaaaagcttctttatggcaaataaacagtaaaaattatgctgggcaagaaatagtgagttgagatgtgtacatttagtgtgaattgctgtcccgccatcacagtctcttgactggctcatcttcccaggactctatgatagtcctcctgtaaaaagcttcctggtaattattttaataatcaccacaacagtcagaattgataccaatgatttacaaggggacagagaaaatatcaaaagaaggaaagtaggaggaaggaaggaaggaaggaaggaaggaaggcaggaaggaaggaaggaaggcaggccgggtgtgagggaaggaagaaaagaggaaggagaggtgaagggagagaaaagaagaggggaggagggagaggaggagagggagaggaggggagggaggggagggggggaggggaggggagagaggaggggagggagaggaggggaggagaggaggggagagaagaggggagggagaggaggggagaggaggggagggagaggggagggagttagttgattctatgactcactgaatattacaagttgtccacacagctttctactgcatgttttataaaattctctctttcatgtagccccctccaaacctttaatacttaaagtgaatagaaagcttttcaataaacataaaaccttggtgatacactaataactaacagtagtacctaaatgactggtgcaaggttacacagctgttaactatgtccacttaaaatatacaacctgtctgcacaggcctagccttcatatatctgcttacattcttcatgctttcacatatggtaaagatttgacacacacttctaatgactacctgtgacagcaagaaaatcaaagtccccagtgcggctttcagtgcctcagggacttggcagtgaccccccaggagagttaatgtgaagcagtcaaatggcatttgtgaaagagatgctccccaatggttttataaacacatctctgtgtacttttcaaatagtaaaaccagggtgagaatgtcagagctgagggtcatctgtaacaggtgctaataaacttttcccgtgtaccacggtggccttctcatttgcagcctgacccagagctggggccttgtgaacaccaggcccctctggaagacagaaaccaggttcagtgttcccatggtggacgtttctcagtacaaagtgcaaaaggtctgcagagaccatgctgaagtttctcaagaatttctctaccataggacagaactgacttctgatttcaaaaatatgactcaaagaacttcctaggcaagcagcattcttccaaagaaaggtgggctaggaactgagacatggagcttcctcaagaccctgtatgcttatgaggccttttataactggatgcctagcttatcactaatttcggtaaccttctttgagaaatgtatctcgtgacattagatttgtctggctcacttgcctcgatccaataatctgttgctgatgcccagtgcaccagggactaccatcttagcattattatccttggcttatagcacctaaaatacctccttgtttttctaagatctgaaatttattcttggctctttcaaccttaaaaagacaacagcatcactcaccagctgccacacagaagtgtatgtgagaagaagaaacatctttgggatctactggaataccagcctgactggactgaagatttctttggcttttagcaagtggacagtgggtgggagatgctgcactttagggaatcttgcctctatgtttcagtaaaaacaaacaaacaaaaacaacaaacaaacaatcctgtccaatgatgccagggagatggcacgagcataagtaacaacatggagtcccctggatttacattaaaactcatgtgcaatggtacacgatacctgtcatcccagcactacaaggcgggtgctggagacaggctccctgaaagccaagggaagagctcacttggcctatgtggcaaagttccaggtcaattgaaaaccctgactcaaaaggtggaaagtccagagggctgacttttggagttgtatacacacaacacacacatgtgtgcccacatactccaaagcacatacatatgcacatacttaaacatacatatacacaaaaaatagaaaaaaaataaaagaaaaagcaggcaaacataatgtagccgagagagctgggagtgcagtctagcaagtttcgtgtgcttatcaagtgcttagccgagggttcagtcctcagtaacagaagaaaagtaaccaggaaaagcaacttaaatttgaacctgataagggaggttccctctctctgctcccctcttttttaagtgctgctgttggtcagcacttaactccatgttacagggaaacagagctccagcatgggaaccgatgatttactcaacaaatgccagccagctgcagtaaaacatctgtgtgagggagaggaaacacaaactcagaaaaccaaatgatggtgatgcgatcggcacgtgcacagcggtgcagagcaagacatatgcggtcgcttgcagaagttatcgatcatcgtattaaaaactgagtgcacaacatgtgagttcctgatcttcacaccgtgccatcagccagtatctgagtggtggttctgagagctgtagaaaggtctaaatctcttgggaatgagctaacaccttgctggcaaaaaacaaaattagaatataaaatagcaatgatgtcataaaagagagatatgggtgcctggactctccaagtcatagaataatcggtgtcatgcaactgtgcaagatttaaaatggccataaggaaggccaacaggacagaaaaatcctatgtgagaaagacttggggatatgtctggatctaaccttctgttacagctaaaataattggctgctgaagatcaatctttacaggaacctttagcaaacatttcaatgcaactgtcaagtagagaagtaaataaaacagagtttcatcatcatgaacccagcaagagagagaaagagagagagagagagagagagagagagagagagagagaactttctcaagaggtcctggttttctccaaaatatcaagaaatctgggttttgtttcttgtgtcttgcttgctaacaatatccaactgccctgccttctctttgattcatagaatttaagttaaaactgaagagagacataacacaccctccaaaaggaagacagtggggaaattatattgctctcacaaagcaaattagaaaacagtaataactgtcagagatgtaagggcagtgccaaccactaccctcctttgcaaaaaaaaaaaaaaaaaaaaaaaaaaagccaggaaatacctgtcccttatcttggtgcctgcagggcctccccattgtagattcaataatacaaggggtttcttatcagcacctggggtgactgattggagctgtgatgtgtttagacaatgcactgtatttaactgaatttacagatgccccaactcagacatggtagtaaacgccagggactaataggaaattaaacttggacaatgggctaactccatttactctcgctgtgtgtaacctgtttagttaacacactctcagacacactttatctttttctctatggattccctgggatatgtttcaaattggccagagattcaatcttcttttcaattttttgtcaccgttttatggccatttctcctttttatggttggccactctttcccttgcagagataaagccaaactaagatgacccccgagtagtctcccccaacccaattattagatagccagcaaggaatgcaagggtatggaaggctccgtggtattaatattaatataacatgagaggaacaaaaaccagtcatggatttgaaagcaacggtgtatttaactcatttgaaatttaaatgtaaattccaatgtgccgggtatgtaaggagtacatgcaaaaacagacagagtgacaggtgcatgctggggtcaagctgagagttattttaacttcattgtttcatgtgtctgctagcaaaaatggcttcagatagacatgtatctacatactgttgaggtggagggaggtgtcagaaagccctcaaccttttcacgtctccaacagaaaaagtaattcttcatgagatactcaagatcagtctgtagcttttttgtgtgtttgagagtgtgtgtgtgcatgcgtgtatgtttgtgagtgtgtgtgtgcgtgtgtgtttgtgtgtgtgtgtgtgtgtgtgtgtgctcatgtgtgtgggtgtggggggtgtatgtacacgtatgagcatgatcctgtagaggcctggggtcagtgttgggtgtgactcctcagtctcatgcatttttattttttcacataagatctctcactgagtctagaacttacatcattgactaggctgtttgaatggaagccctaaggagcctctgcctctgcctctgcagccctgggattacaggcaaacaccaccatatcatttttttaatgtacatgagtgttttttttatgcatgtgtgtatgtgtaccatttacatacatacctggtgcccacagaagccaaagagagcatcagatcccctggcactagagttgtgactgttgtgaactgccacctgtgtgctgggaactgaaccttggctcctctatgggagcagaaagagctcttacctgctgagccatctctccagccattgtctccttttaaaatgtgggctctatgggtcctcgtgctggttgggcaagtactttcctgaccgtctctgtatgtctttgtagaatcttggccagacgctattcacagagaacgccttctgcattatcagtgactgagtccataaaggttctgttgcccttagaaactgcacagggcttcatcattaatgaaagcatgctacctccgaggctgaaagtgccctttctccccagctgaccacgcccagtcctgcgtgttgaccacatccctgcattaccctggccttgagaaaaacagtttgagttggatgtcaaacaagctgcccactaaggcttccagcagcacacgcttagccagggtgatctctgtgtcgcttcttcgcatttattatgtacacatggacattggtctaattcacaaagtatgtttacaggtaaaatttttacatgaaatctaccacatcaggctcagggaagtggacccagtgggcaacagtgtggcaatttacaactttaaaacctaaagaatgaaactggatggagagatgtcatatatgggctatatgcatatgcagccaagtctaattcttcgaccctgggacataagctctcattagagccactggaggacccagggtagtggcttcagcttcatattattagtttatattttgatggttgctgcttttacaccaaccatctcttcagaattttacctctgatgagatggctgaatacttacaatggaaaaatatgtaaccataacatgtggaccaccttgctcgtttcattcattttttttcaatttttctagatagattctattcatataatatattctgattacagtatcccctccccccactcctctgagagccctccccacttcacccacccctaatctgaatcatcacccattctgtttcccctgtctcttgttaggaatcaagcaggcatccaaagaataattgtaaaataaagatgaaacaaaattttattctatttttaaatggcttttttttagaaaggaagaaagaaagaaacaacaatggtgtcacaacatcacacaaagccaagtgaaaacaaaagacagaagtttctacaatgaaatctctgaaagtaactccactatgtggaggcaacagtctagcatggttgcacagagttctcacgtcacctgaatgccaggttagaatccaatgagcatccctcagaaaattggagtccacgataatcatttctgtgaatagctgaagtccaataaatgttacttctctttatcggctctgattggcatgtgccgtaggagacacagacaaatctttgaccaatctttaattagtgtcactgatgagatatttattcttttaatttgaatttggaaacccaataaagccatgtttgcatcttttatcaacttaaatattatcctttattgctttttccacgactatggcttctgaagatattctcctgaaacaacgggtatttcatgtatgcacagcagcttggcttttcatctaggcactgaaattataaattcattgcagccttttttctgtagtgatcacgatttcgagaggggtatttttagacatcctaagtccttcttaaggaatcatacttttgccaaatcaaaagcttatcatccttggatcttctactgatagcaacaagaaagatgagggggacagtgtcactgggcttttctgtgcaggtggggaaaccagtgtccaagcactggacgcagacaccactgttctattttgggctggactgctgatgtgctgcagatgtcagctaaccctgtctctcaggccagaggcactgatacagtcccccggcctgatggttctcagggacctgagctcatttaaaagaggcagaaatcaccaagcatattattaaaacctaatgaagcaatcagattgcatcttgttagaaaagcagcttcaccacatccctctagtccacaaaacacctctcaggttagtgtatccagaataattcaggggaggacgtgtgccctgtgaaaacatacagctcaccgcccaagtggcctctgcacggtgcaggagtcttggatacgtgaggtcctttcctagctactgacttggaattttgttccatctttcctgttgtgcttaacagaatggaagctactttgtagtcgtaaatacatggaaaatgtgtgtttagggttgagagggagctcagcctcagttcttccaagaagtaagaaaagcagtagctgagtttatggtttgaacaagacctgcttagtgaaggatgtgaagtgggatccttagcaacttaaataagagccagtaaaatagagtactttctgattaactaaataatctttactaaaaactatgttccacatagcctgcttcctctcttaaaatattctaacatgattaagtagatgcaaaaatgataaaaagccgcctcgatgtcgatgtgttagtattgcaggtgtacacggtgtatatgatggcatttgttgtcaaactctgacaaagttcactctgtcacagggaatcttggcctgcgattctatctggtggcggctgtcaccttgtgtcttgcatgtttcagtcttacttaaaagttcttttccatacttaattcatgatggcttactgtacctttccacaaacgtgaagttcaccgctgcagaagggcccagcccccgattgtctcccatgcagtatttggtagggagcactgtgtaggacagcaggtcggctttcaaatcagaggtcacatcttaagcaacagaagcacaagtcattgaaatagacccatggtgtttaagaacatgagagtgaagcctgcacccttgtgcaaggtacaccatactttctttggtctccgggttcaaaattattccacaagatgctcccatttcccaaagtggaattactactgttagcaggaggacactgacttgagaaaaatgggtttgggatctcccagcagccagctgtatccaggactaatttcctcatctctgtaataagttaaactgatgaaccttacagacagaaacctttgaagagtaaggaagcattcctcccagccacccccaacctactgaggctgcacaaggtaagacatctatctttcaacagcctctgatttgcaaagaggaagtgtgccttagcttctaggggctaaagcactgatgatcagcagcagccccgctgtgttggggaagacaacccaaatagcatcaatttccttgtccataagaacatgtggaaagaaaagtgatattaaatgtacttatgatgtatgtgtgttccttagagttgacattgagcacttgtcttacgctaagcagtatcttccatgtattaacctgagcagtaactccacaaagaagttagcaaaggaaacacactcagagtaaagaaggtgcccaagtctaagtgaaaccacttagcctcaagtggtttcaggcatcacatcacctctgagggaaataatcaagatgaccaaggacatctgggatggtttttgctaaatagcaagtcctgggaagacatgggaagtccagtcatcatttctctgcctatcctgtgtttccttcccagccaggccagactctcttgaggtggcagaagaaacaactcaaatgatgtgaacacagctcagcagaggcactagatacaaagaattctgtagacatgtatgtagatgaaaagtgtagagcatgctgtagccacgcctacgagggtgtggtcagggtgaggtagagtgagggatgctcacgcagcaccctgctttcgctttcatcttccacttgctgtacttaccgctgtcccaccggctggctaggtcactctgtaagtaaggcttttccctattaaattcccttgtatttttacctgcctccgtattggtaatttcccacattagaaaagtttatgacaaatataacacagagagacacacatatgcactcttgtgtgtacatatatgtgaaatccaagaaagcccccagaaaatgtctcctggaatatgtggtacaatgacctaatcatcaatgttgctgagagagatactctgggtgtcaacattgtgttggatttcaagatacagaggagaggaggtcagacacagagcaagcctatggtctgtcctccctgctggggaatccacagggggacttaaactcaaatatgctttgtgataggttagaggcacgcaagacacacagagtgagaagcaactgagctggcccaaagactcttacgattgaagtcatttttttttctagacatgctacaatccaccatgcaaagaaggaaatgaggaagacattttgattgagagcatgaaaagcaaatatataagagcatgaaaaccaggctataagtggtcaagacagccaaagccaatgccccacagagaagacaaagaaaatcaaggttcaacatgagactggttttttttcatgccaactggtgaggctggacatttttggatgttttgcagacacaggtgggaacttcatgtccgtgggatcattgcagcagcttagctgaggaaggtaagggggctggacgacattagtgatgaggggggaaacagagagagatgaattcagatgagctaggaacaggtagaagaaaatgaaaggcagtttcctcatgcattatgttctcaacgcttcttattgggccagagagatggctgggggcatagaagtgcttttcactcaaggctaatgacctgagttcaatcctggaggccacagaaaggcagaaggagagaactgactctcccgtttccctctgacccctaaatgcatgccagggaatgccagtatcccttgcctttcgcatcacacaataataacaacaataataacaataatagataatttttgacaaggctcttggaaataaagagttgaggagagatgaaagggaagaaggaaaggggagggagggaggggagagcagagacaggggaaaggaggggaaggaagggaagggcagatgagcaggcttaggctagtaaagaaccctttagttctgtgggccacagctaagtgggtgaccacacaccttgggtaacagtaaagacctaactgagcttggtggtaaccctccatcactttaaaacatctgtacgtatccaaaatgcccttcatagtgcacccctctttctgctatgcccctcttctttcttgcgttccttattacctctctgtgctaggcccaagcacacagcacagcttagtttcctgaggcaggaagtgccgtcgccaccttctctccctctttactcagggtccaaaccacatcatgttagatgcctcaaaaccccattatacatatccaagctcctccaaactgtccccagggccttgtttacctcacaagcctggcagtgtttaccatggagcctgcagcaatatggtgggataacttaatgttgctgaggagacacatttatgcttcttccatgaataatacttagaagaattacgggcggtgagagtcacgtaaacacacaggccgggagaagcaggataactcacctggacctcgggggtcctcgccctctgtccgtgatatcagagtcacgaacagcaacgttattttctgcttttgccaactgcactgaaaactctctctggtttccatggaatctcaaaggacttccagagaaagttttctttggttttgggagatattccatgaagactagggaaagtcttttggaaagttctgaattgctcttggggacttttcctgaaatggacccttcttaagaaatcttttgactgttcatttgaaaaccagaaattttctgaataaaacaattgtcacatgttgctgtcatggcagcatctcataaacacaaaagtgttcatactgagtatgggaaaccctgtcttactgctttcaactctgtggcaaaagtcattaagtgagaagcttcagaacatggaatgtgtgaggttcctgttgcagttatttagttggttgatttgggttggtttaattctatgtcgttggttgattaattgatgcatgttgattatcgatttctcaccctctcccctggctttttccctctctctctctctctctctctctctctctctctctctctctctctctctctctctctctgtgtgtgtgtgtgtgtgtgtgtgtgtgtgtgtgtgtgttcttgtgtgtaagagtgatcatgcaagtgtgtacctgtgtatgtggaggccagcagtaaacctcaggtattgttcatcaaatgtaaaatgtaatccaccttcatttctcaggtggggcctttccctgagatctggggctctgcagttctgcgaggatgactgatcagagagcctcagtggccctgcttctgcctcctcagagctaggattccaaatgtttatgccattcattacatcagatttttcacatgggttctggggataaaactcaggtcttcatgtgtgccaagcacattacaggctgagccatctccacagcccctgctttggttttttgagacaaactattattaggtagcccagacaggtagaaaacttgagatcgtcctatcttagccttcagagttctgacattacagaaatgctctatccaacctggaaaaaaagacaattttaacagttcttcataacccaatttatttgagttgctatgaagttgcctcttttttattcattaaacatattatttgacattctagctgagagatagcaaaagggtgtggaaagaccgttaacatgtttttctgcaggactccacataggctcctaggtactgtgatgcaaagcctggcctgttggttagttcatcatttgatggagtcgaaagtgcacccttcaacacccaccagagtcaacacaatcaccttgctgtttgcctcgtctttagccatctccagagtccatctctgatgttgagcactgccagtggcgtcttaaaactcttcccagggacaggatcctgggaagccctctagctttctctactattgcttttcttcaagcaatatcaacaacaacaacaaatgtgtctgaaagatgaccaggtatgaacggggaagcagcttcactttctgagtggctctggactatgcttgaagcttggattgcatgactgactttttacctctagcaggtttccctccactggctttacgatttcacgatttgccctccctgaatatcatcctagtgccttgtttttcaggctgcactgaagggaccatcccttgtccccaaaccccaaacccaggctttacagaaacacacctttcacaaagggtgcacattgtcacccagctgagtaaggattaagttaaaacacagcagcggtgtggtgtgcatgcaggtggcttggctccaccaccactgtccgcctcagagcgattaaattgtgtcggagatggagggccttcctctccccttctcacacttacagatcaagcagtgacaaatgagatgttaccgctcttgtacagcaaggctacaatctgtcaaaatccaacataatttgtgaccctctgtgacatcctctttctctctctctcctttttttttcttttgacatttgaatacagtgattgtgctacagtcaggtccatttaagggaatatagtcaatcctatctaaaggaatacagcctgcgtgctccaacacggaaactgaatgtgtaccggcagagtcctccacgaccctttgtgttaagtgcataccattaacaatgaattctgatttttccaagttatataatttgatatcttgacagcccagacacttaaagcgttactgtttgttttaagtggctttattttattgtttaagtgtcagtatcacaataaagtgaggcatgctgccttgtcagttctcgctggggaagtgttcctgcagagaggagtcttggaagagttagttctaaaaatggactcaagagtgaattgtaatgtctcttggctgaacccttaaatgactcatcaaacatatttataccgcattttctgtttagccggggcctttaagaaggcaccgaagcgtaaacagcccagggagcagggtgtcttaacttactcaagttgacatccttgtgagggtttaaaaaaaatactgactccaggaaataactgagggatgcatgatagagcccacagcccagatacaggaaggccccttccatgtgctttaattgtctaatcccccgatgacaaaaggcggattagtgggggagaagactggggagccgagaggtggattaaggaaactatctaatattttctaaccactaggatggctggaaagctgattctttcagactttcactccattcagacctgtctggggtgacaagcctgtcacacttcagaacaggcaatgactttgtacttcaaaaagactaaagatctgtccccaaagacttttgttgaccacaaaccttcaggcaggttaacgccaaccttcggggaaatatttgtgaaatgactttgtttacaaagaatgaaagctaggtagactgtctgaatacactctgctaaagaaacagctagctagctgtacattaagcttttggggcacaatattttctgctctgtagctccttgtgtgatccacctaagggggcaggcttacgagcaacattagggtttatgagggatattttgaaatacctcctacttgattaatcaccctaaaattcagtgggccacaaggtatcacccagtccatagcatctgagaggacccagcttagatggaaatgactgtgttggcacacggtcatttgatcaccaccgatccaccctcactgtaacagatctttccagctctcttggacgcaatgtttgctgttactgttactcatagggaaaaaggaacagtgtccggaaagcctcttgcagaccttgtcttctgaaggccccacttctctccgaacttactagcgggatcaagcatgtgctaattctacctagagcttttagctggctctgggtctgtggtcagaattctgtattttcagaatatgtcacaactgctgcagtcacagaaaatagctactgggccctggatcctgttcctgtgtgtccctggggtgtctcatcaccatgcaggtggattaggaccttctgttatccctggagtggattttttggtgaatgttctgctagggagccattgatgggtggcacattgagccagggcattccgagatgttagacgactgtcctgtcaccagaacaccctcgagccaaaatgcatcgcccctctacttcctcacatgttttgttatgtgtgtacgcctgtgcatgtgtgttcctgtgcatgtgtatgcatgtgtgtgtgtggagtgtttgtgtgtgtgtttacacatgtgagtgtgaacacactcatgctgagtacaggtgtggcagtcagaaaacaaccatgggtgttgctcctcatcttacacttttgcttgagaaaggtttcttgattatttgtggctggccctcgggtgggtctcctgtctgtgcctcccaccccactgtagaagcactatgatcacacacacacacacatatacacgcacacacacatacacgcacgcacacacacacgcacgcacgcacgcacgcacgcacgcacgcacgcacgcacgcacgcacgcacgcacgcacgcacacgggctgctgtgtctggacttaggtaagttctgaggctcctaattcagattctgacactcaggaggtggctgctttatccactcctccacccatcacctgactctttgcagggctataaatgcagatgagttgggactctgtgttgatctggagcctctgctgtagctgactctagccactggcttgcctgtctggctccaggttctgtcaaggctttcagtgatcttacacactgccacaaaccccagagctgatctctccacacccctccctctcttatctcttatctttaaatcccttcctgcttttcacatagcatctctattgggcacaggggacacagggctggctttcacctttgcctgggagcaccagaggaggaaagagtgaagtagaagcaatattattaactttaagatcttccctcttcctccaggataagaataaatggtccccaaagatcccctgctaaaggtaacaccggttctttcccataggaatctcatcacctcagtcctcttcctcctttttctttttttgacagcacataagttgctcagcgtaggcggagatctcaagcaaaacctgtgcagccatcgggtgacattttcataataaaaactcagccgatcttcatctgctccatgtctccagtatctgctctctgatgccaattgcctcttagtttcccttacctaaaggcttcatcacactacattacatcagccagccaatggtcattcactacgttacatcagccagccaatggtcattcactacatcattacatcagccagccaattgtcattcactacatcattacatcagccagccaatggtcattcactacatcattacatcagccagccaatggtcattcactacgttacatcagccagccaataatagtcacccagtacattatatcatccagccaatggtcatccactacattacatcagccagccaatggtcacccagtacattatattacccagccaatggtcatccactcccacttgacgacaagctcaaaacaacccacatgccatgcatggcttctgttaaccaaaggccacatgaaagtgcccctaaaagatggtaactgaaggctagaaatagctaccactgtttataaagcattttaaaaaaggtttcatgactcgtaatgtaacacccaagcagtgtcactgttaaaaacctgccccttgcccaatgcctattcatatagcagcacacatacgccagcaaggactcctttagccccctgctaatctttaacataagagagggaccatttcctactaaaggctggtcctccttaaaacaaacaaaaccactgaggtagggacttttgaaaggaagacaagtatcccacagtagagttcaaaaggacccaaagcatttcaacatccggcaatgaatgatctctatctgtggcccttatgtccaacaatagaagtctgataagaagaatgccaatctcctggcctagctccactaagcacttgcttctgaaaggctacagttatctgcctgtggaaataatccatggatgtgtccaaaattaggttgtgagagtgagggcctgcatgggttgggggcagaagaattttaacatcaatttgtaagtgctctaaaaatgcaagctactttcccttggcggaatggctaatgcattacaagatttcatgacacccaaaccagtgagtgtcagaaagatttaagttcaaatcaacatgcatttattctacggttttgcaatatggaaggctgatggcgtgaatattttacggtaatgcttcaatattaaaattcccatattgagattctagagtcagatacaaattatatttaaccaccagaaaattcattgaagtacttattagagtatcagtaataatagtcattaaaattttatgatcacttaagagaacactaaataaagacagtttagcaaatgtcctatttacatattttaacaagactcacatagcaatatccaaatcacattgagagtaaaattaaacttgccctcaaagggacagatagacatatgacagatgtgccctgtgtcttggtgtaggttgcattgattctttccactgccttgaaggaccagctggagtacacaacatctgtccaagagccggtgacttggcattttggacatcaggaatgcatctgcaaacctacaagcttcatttggcaccatgtgtttttttttaagttttctttatttatgtgtgtttataaatgcatgccatatctgtgctggtgcctttggaaaccagcagaaggtagtggatccctggaactggagtgacagatagttgtgagccacctgtcatgagtactgggaactgaattcaggtcctctggaaaaacagaagttctcttcactcctcagccatctccccagccaccacatctgtcttatttttctaatctagaaagttacagatatcttacctaattttacatataaattaataaatgatcagtatttattgatatatatatgtatatatatggtacattgtttttaaatattaacagggtttgttttctttggcttatatatttaatgctaggaattattgttggaaagtgggtgagcttgggaggttggtaggtccctggagacttgatggggatatatatatatatatatatatatattatatatatatatatatataatttctcttattggttgatgaataaaactctgtttagccaatagccagaatagccaggcaggaagataggcagtgttaagagaggaaggaggaaagcagaggtaaaccgccagagtagagtcgccatgctgttgaagaagtaacatgctggattaccagtaggccacagcctaatggcaacaaaagattaatagaaacgggttaaatatttaagagagagctagccagtaattaattaattaattaattattaatataagtctttggggctgaagtggccgtgggacttagtaggacagaaaaccttcatcttcagagactctcaaagggagacatgtaagggcatctggaaaagacgagaggcctggagtcatcaaattctgtgacatgtctggcattgacctaactcactttagtttccttaggatacgatttacaggccagcccatccattagaaccctgtaggcattgtcagaaacagaagcacataagtggcaagttcatctgaagtgaaaaacttcctaatgtcatataggtttgggtgttatggaattatgagcacgtgagcacattgcatatgtatgtttatgtgggagggaggtgtacaaaagcactcgatgcaaaagaaaatgccaagagatgtttccagaggccaaaaacaaagcaaaattgaaaatgaccattggaaaatatttgaggctatttttcattctactgtgaataatgaattcattaagaaaaccaaactctttattgttctcacttctcctttatagagaaatagggattatctaggaatggcagcacaaagttatgacctcagtactagggaagctgagacaggagacctccagttagggacagaagggctacataatgagttctaggccagccaaggatacatagcaagcctggttctcaagaaagagggaaggaaagggagggtgcagagagacaggtataggaagaagcaagcattaaaagttcttccactgtcaccggctgctacgtaagtgcacaaaacaattatttatacagtagctatgggaactttacattagaatgataacatgaaactctagcaaatagtaacaccttttctttctttctttttttttttttttctgaggcagggtctctgtgtagctctggagcctatcctgaacttgctctgtagaacagtctagcctcgaattcacagagatccacctacctctgactcccgagtgctgttttttcctttttatcctgagctgtatatgatagtaatggaagactaaacactacagataatacacaatgcattgtgagtccttcctccaaagtgtatttattatcagaatcatattcttgggttaatagtaaaatctgagtccattttttacagcacagaattgttttaattgtgaagctactatatgccttggagacagttgacaagcatgatttacagagtagatccaatgtacgtgaccagcagggtcaaatttaaccataagttcctagcagccaaaatccatgggcaggcctcacaactgaaatagtccgggtgtgaactaccatatcgtgaggtgccaagcccatgtcttccccatctgtgccaccccccacaccaactgctcaaaactgaaaactaccaatccctctctgttcccacaatttaggaaccctccactatatggaaaaaaaaaaaaaaaactgtgccaggtccattttgaaagcctgggctgagaagccagatccggggtctgaatctctgcactgtaacttaacttaccagttgaatgattctgagcaaaatattcattctccctctccctctccccccctctcactctctctctcccttccttccttgctttctatataccatgttgagatggagcacacagggcctagcacttgccaaggaaacactccaccactgagccacagcccagaccttgaataaatcattaaatctctctgttccccaagcccttcagacacaagatgcatttagaaagaaagagagacagaaagaaggaagcaaggaaggaaggaaggagaaacagagagaagaaatgaaggaaggaaggaaggaaggaaggaaggaaggaaggaaggaaggaaggaaggaaggaaggacgaacttgctagtcaggtccaatttcaagtcatcattattacctaacacactttaaatcattttctcctcccataaccaattttccagttcaaatctatattgccctcagataatctttcattggttcagaattttattcattcattcagttgctcactttctcaaacatagtttggaggacacaccaataaaagtatagggaactaatgaaaagaactagtgaggactacccaggacagtaagtgttcttgttggagggctggggccactgggtaatacacactgactgattctcacacctcccctaatgcattcgtaccatgctgcctctatcagtgaagacagactgaactatgtgaaaatattcactctatattttatgtgacctagaccaccactggaagaggatatctacaaaaaatattccttcctaaaaggtggaatttatcttccattgttctgtgatttgtatgcatcgttgaccaactacagcttctttccaacctatgtaaggcaagggtttcaggcagggcctcactgtgggaggtgtagagatgggaatggacttctcagttgggctacctacctgaatctgctttcccttgaggcaataactacagcaacatcattttggatgccagctgtcaagaggaagagcattttccaatggacactcccttcccattttgcttttatatcaagccaatgaatatggataagaggctggacacagttctggttatggatcctcagcaaaagttaatgtaagtggcacataagtgatatttatgtatacagtctaacacactcagagcactaaccttgacctaccctctccaaatggacaaaaatccaatttattatccaatttaaagaatttattctttttatgtcgtactgggaaattatgcctatccagctcatgacactacaaaaagaaacaccccactgatatgctcaagactttgacaaagaggtgtgatatcaaaggtcacacatgatgattatttttgtcagttgtatgtatctaataaaaagatgcccattggctgcagccttgggttttgttgctaagagaagggctgggagatgaattctctcactcctcaataaggctccatccattagaagaaatgactctttagctatcatgggtctatacttaggatcttagagtctcaaccatctcatgcccacatgaacctcctgaaggaatgcctgtgattcattggggcatttggggaaagtcgccaaccacagaagacaaaatttccctgactggttcgcctcacagtatgtggctccatgaattttcctgacaaaatgattattgatccttctaacaataccccaaatccagtcagacaccgaactaggtagattcatgcttctcaagcctgcctctgtctttctagtgtcaccatcacccggtggatatgggctgtccttgtttgacattggaatatctgcaccagcgtataagctaggccttctgctgtccccccttcaccatgtggtgttacagactcatgcacacctgggtgtggatcaggtggttaatgtctacaggcctcagagcaggagtctggaattgagatagtacctttgatgatcagggactgttctcttgctcaataattttttttccaaattctgtcttttataaaacctgggccctgaaagccccattcctctggtacccatgagagtctgtggaccatagtgacctccatggggaagaagtccttgctcccagcctctccaattctaagaacacatttgtccttccaaaagacacagagttctgcaggccttcttcaaacattcaggtcatcattattcagcccaggaactgaaaatgggtagctgccaccaggcatatttatatggaattctgtctaggctctcttggactgttgttttcctttaggcattactagaccctcctctaccagatttccagccctattataagagacctatagataacagaaaatgtattcactgtgatatttagagagatagggtctgacggtgtagctcaggggcagagcatgtatgtggcatgcatgacacctggtctcaatcttcatcccctcacagaggtggggcagaagcaagaagaaagagtgagatgtagctctcctatttattcaatagcctcaatgaaaaacaaagaaagttatagaaatagtttattacacacacacacacacacacacacacacacacacacacacacacacttttccccaaggcagtgcacatgattatttcactagcaggccatgacttttagacactttttgtgtctcagaggcttactttataagcccagaattttctgaagaagaaatttagacatatgtcaatcatatttattattacattttccccaaaatattcaacaccgatgtgagaattttcataaattactgctgtatttttgaaaagagtttctgtgttttagattttaatcataatatttaaaaattgaagtaaagaaagaagggagttatagccatgaaatgatctaagtatttctgatagaggatgttgtttaaaaatattcttactttgccttctcatggttaaactatttacttctaaatatgcccagtgaaatgtatgactgaaattggtacaagtgaagatattaacactaagttcttaaaatcaagataacacaagggataaaacatcttttcttggcattatgtgggttaatggtacccatgcaggtgataggatccttgtccagctaattcccaaatccaagaaacacaacaccacatggcaaaactagaacacacagatctagaagagttccaacacccacttgtctgtgttggtgacaaaactctgctatgcagagtgcaaggaagttgagaaaagaagaaacactttagcaccagccaggtgctcataaatcctgaaaagctaactgcatccagtacactgaacacttacccaggtcacagtaccttgtggacttttctctaggagccacggccctctggataatattgatgttgatagtaactgaacactaattcaagttggaactaatatggggatggacagagcttgtgtgtgaatgcatacaaacaaatacagagcaatgggtggaccatatagagagcaggtgtccattgagctcagtagtatacactcacatggacaaaggtatcaattcaaaggagtatctcatatagggaaggtacatgtgtggggtaggggtgtgcatgcatggctcacatgtggaagtcaaagaaaacccaagatggctgccctaagatgtctcttacattttgttagagtctgggtcccttatgtgcctgagaattccacaagtaagccaggaccgctggcaaggtagtccccaagaatttgcctgtatccatcttccatctctcctcactggtaccccctgcacatgccactgtgtccatctcctcacagaggttctgtgatcacacttgagttcttgtacttgtaagacatatgctttatagattgagtcatctctccagtccactctctatgattcaaattctctaagacaagttcatgttctcagatcgataatagattgaaaagaccagtaacactctccttatgtgctttgccaataccatttccacgaaggcctagcaagaagctcaaagagaaacaaactccctaaggatgacttccaagtgttagccctgttctttcacagttcccaaggatgagggggagtcagcaccctagtccagatgcggaatacacccaagacaagaaagttcattttactcatttccatcaacacttagaggttctgctattgtagtcactcacctgtcagtgcaaggaagaaaaaggaaactcaaatacttcacagtctaagtaggccagtttgagtagaatgctctggctgatacctaggaaatctgtccaattctctcaaagacaaatagaagatagatagatagatagatagatagatagatagatagatagatagattagatagatgatagattagttagttgatagataaatagataataggaagatagagtagatagatgattgatagatgatagattagctagatgatagatagatagatagatagatagatagatagatagaccaatgacctacatggtagacaatggccatgtccctgagttccaagtattaactccacaaagtgagatgagctatttgatgacagctgtacaccctacctggaacagttaatatggtatgaaatgaatattcatcacacctgcctttggtgccacatgggcatttacacgggcatgtaaggaaaagagttaagttcttcatgagctaaaacaggactctactccctcttctctgtgggctgctctcaagtgactgcttctctctatgaaatacttaccaagatttggcttcatgcttccaaatgctttgcaaatcatgttgtttttatctctctgtctctgccttcctccttcccactctcccacccttcttccctcctctcccagcccctctctttgagacagtgtcttactatgtagcccaaactgacctggaactcaccatataacttcaaactcatagtaatcctcctgctttggcctcccaagtactaggattgcaggtataagttaccatgcctgccccatctctcttttaatctctctctaaaactggttaagccacaactatcatttcttgccaccaaagttccatagtgccctttgatcacttttgtaccaacggtacctaagcagacttctcactgaggctctgttggagaaaagaaaatctaagcagtgtcggggtgggtttactctcctggcatgggttttaggctagaccggtcattggttggtcacttcctcaatgcctaggacacccttaccccagcacatcccataagcaggacacactgtaggctgatggttaggtggctaggttggtttcctactccctctacctgaagtcttgccaggtcacaggagatggccagttcaggctatgtatctacaattgctaggagtcttagctagggtcatccttctgaattcctgggagattcccttgagccaggtctttacctgacccccagatgcctccaccctttacaatagtctctgtaagtcctctcccctctgcctttgctccagccttagcactcatgtccccatccccaccagcctgcagtgcactaacaaaatctctttaatttccccttcccagagagatccggtcatcttctacaatctacaaacttgattttaacaacaaaaagaagcaaatatagatttttttaaatcccaaattaactactatttataaaatgtcaagacacacacatctttttaaatctactcctcttgatttccgtttgcttagaaaccatagctacactaaatatccacttacctattaatgagttgccaccagtatctcaagacagctcaagacacttgctcacctgagcccccgcaggaaatggaggggacatgtgggtgaatgacaatccttgcttaatctctgaagagagaagatgacacaaaaaagggagtgttgctagatcactctggtgagagctgttgctgcagtggtcaccaccgtgtatctagggtgaagagcttacatgaactcagttgtgctttggttccttccttgagcctgttttcctagtgtttccattggcagctgagcgactggccttcctgcccaaatccatttctgttcagcgtaagttaactaacattgatgtctattgattgctaggagtcccactgacggaatactgtaacagaacagatggccaagcgatggcaaactattctgtcctcttgtttccctttctttcttccttatgttttctctatcagagagaattaccccttgatagagcaggagaaaatcaaaacagccacaaacaagctcgtgagggacaaccatgcatctcaacagaaagataagtcttggggttcagggaatcacatggaaatttctaggataacatggtcgtggaactgaagaagaatccctgtcctccagttcagaaacaggcacaagaagggaatcacgtggcatggcaggtagggtcctgtctctagtctccagagaagggaagaccagggctcatacagaggatgcattcctgccatgctccctgaatgccgtgctccctaccacatttcagtgtagataacatcaaatcctggaatctaaagcaatataaacaggacttgctctctgtaatgcagtttttttactttatttttttatttgaattagaaacaagattgttttacatgtcaatcccagttcccactacctcccctcctcccgtaccagccccctcccaactaaaaccctacctatcccataccctttctgtgccccagggagggtgaggccttccataggggtcatcagagtctaacatatcctttgggatagggcctaggcccacccccgtgtgtcttggctcagggagtattcctctatgtggaatgggctcccaaagtccacacctatgctagggataagtaatgaacttctacaggaggtcgagtagatttctctgagatgcatttttatcccttttcctagtctgcattttcatatctgtgttacctgatggctagctaactcttttcaaatgacacaagaagggtaaaactatattctatataaaaccctaccctgttggttagggttattctctgaacaggtgagtgaaaggctgcagacaaggagatacccaattggagataataactgactgtaagcaacaatggaattaacagaggaaggggtgaagagcagggtgtggaagacagtgtagcctgaaaaagccagattagaacaaagtacacaacttctcactcttgcacacaaaatagagacttccagtgaataaagggtcccaggatcaaaagaagggagggtcagcggctgttcaagagaggcagcaagactaatctctgttagacagtcaggaccaaggcagccaaggccatggaattaaacacagcagtgtacttctgtatgtttataacatggaacagtaatatttctttcatgttccatgtctttgtgtccggtggttcggttaaaacccaaaagactcaggcataaaacatacaacagttctggggtctggggccactaatgcactaaggagcaagaaacattcagaaaaaagctctttaaatatttttctgcatgtatcgttcattcatggggggtgcaggggacatgtgtgccacagcacatatatggaggtcagagacaacttgcaggagtcatatctcaccttctaccaagtgggttctgaaaactgaactcaggacatcaacctcgttggctgagccatctatctctccagcccctgagagccaacctactcatccaggttcaagggtttcactttagaactgatataaaatccctatatgatcaagacagcatgatctaatatacaaagcgtgacttcacagacagtaagcaatctggggctgggagacaggtcagccttgccaatatgaggtcctgatttcaatgcccagaggctgtattttaaaataaataatgaaagctaggcatggtgtcatgtgccagaaatcctgtagtgaggagttggagtcactgaagctcagtgaccagccagcctaggagatggggaactccatgacagatcctatctcaaaaatcaaggtagacagcacctaagaaaagccatcccagactgacttgtagcacacaaatacacatgggcacccctacacttgcgcgcgcgcgcgcacacacacacacacacacacacacacacacacacacacacacacacggtaaaaacattaaaaggttcataagtttttacctatagaattggaaaccccttcattacttgtgcatttatctcaatttccaatttttctggtcacttataacccattctctttctccatatcccactactctggctgctcacacgctccagccctgaattcctcctttcctatgggtctctgtctatctggtcctcactctgagatgcccactcagctctgtccacatatctcactgccactctgctccatctagtggagtgccgaactctgcagaagtgtgccagcttaaagaaaaggaaaacagaaatacttgctatgcagggttgtgaactaaacacaggaaacacacccacacttaagcttttattaggttagctaaatgaagttccatttcccaacagcctggacaggatcctagagtcctgatagtctacttctttgagaaagcaaatgtgtgttaagccagggaattcagcagcatggattcttcttgcaggactcttccaccaagaaggaagaggaggtaaatgctcacattctgtctcacacaagttccattagcatagccctactaatgtaaattactatttgataatcatgaaatattctctagggatgacttagtttgactatttctcaagcttcttcatgatagaaagttcaaatattaatataacaaaaatatccctgtgctttcttttttacatttacagaacatgaggtgtgaaccatgtgaacattgacttcctcacaaaagagtgaccattcttctttaggaaatatgctttacattcctctatgaggaatatgttttataattgttttagagagtgaactacagaagaaacccagaggaaaggctggagatggctcagaggttaagagctcttaaccactgttgcagacaacctgaattcagtttcaaggacccatgccaggtggctcacaatagtctataactctagttccagagaatcctagccttctggcttctgtgggaacctgcactcacagccacacacacacacacacacacacacacacacacacacacacacacacacacacacttaaatctaaaagaagatagaatcctagagccagtcgagcactgtctttagataaactctcagtagtgtgtacacacgattcatataattagtaggttcttggactgggaaggatcatactgtccattgtcacttgtgttaattactgtgattctgggctcatggaaagcaccatgttcatgaatataaatcactgttgaatttgacaggatcatagtttttaaatgcccactgaagagcctgcctggagctgactccggatggccagctcctggggttaaggctgtaccctctgcattaagttttccaattaaaaactgactgcagacagaaatcacagaagaaaactaggacagaaagtgacaaggttctctcaacagtgcacgacagtgtgcagacattagaacaaccgcgttcattcattcattcattcatccattcattcattcattccccaaagtgtagctacagcatccctcttaaaatatcagtctaatttgctccaaatcaatgcaggaggagtcttcaaaatcacctcatgtatcccatcaaaatccaaaactcttcactggacttgaagagccttcattgttcaattccaagctgtgtttgcttcataagtagcctccctttttgcttaatccccaagccctgggctactgttttgcatttctcaaaagagcaaatctctagacctctgggctgtaacatgtgatgatatctcccctcagaacacttgctctctttctccatcttcaccgacccatttatgctccatgcctcactatgaacttgaaccagagcaggtcaagtgccatagtcaatgtttccatgatgctaacactctctcacctctcaactggacaggaagctcctaaaactctacacaattgtttgtcccagcacctagaatactagctggaagaactaaggaactgagcagactatctagaggcttttgttgaatacttagatgaatgctgaggcaggagactaccatgttagggaaagcagctgcagaccttccctggtggtagaccttcaaggacacagctctactcaatacaaaagtgggaaggaaatcttgtaagacaatctaatgtttacaggctatgtagttatgcttgctgggtctatactgatagaagatatcactgtaagaaataaatttaagacccagtgagtgagttagatcagaatggaataattcaggaccataagcaggatttctctactgcacttattagcttcaatatctaagtctctcccaggggagaatttggctcatatataggaatgctaactttttttttcagtagagcagagtctaatcaagtgtgtaaatgctgcaatacaccaaatggcagggaaaattaatggtcctctgtgggtcctgcagcgactgactcaccactgggaagtgactcaggcagcgaagagaaccaggattactgcaaggacttatgcaacctatgaggaatgggaaatggccttgctttaggtgaaatgcaaagtctgaggggcttttggaggagccgtggagatggagtgttagtagaaatatccagtttgatctgcaaagtgcttaaaaaaaaacagaaaacttacaatttctgttattgtgcatgaagggctccaaatgacacctgaataatatatttgtttaattgtaccatgcgtgtgatatttttctgcacatgtggaggtgtgtgtgagacggggggggggtgtgagatatgtgtgaagcagcacataagcattcaggaagtcacttctttccttctgctcgggatctgaggatcaaactcaggttgtcagccttacagagtaaacaccattaaccactgagcaatcttgccagttctccctgtacatactttagttagttaattcttttttagtattaaaaggaagaagaaaaatttaaaggctactcacccacagtgctcctgagagccaatggactctccataaatgtaaaactgaaaagtcagagattattaataagagccagatctaggagacgttactgaaaacatgagggagataacttggctggtgagctcttatcactgtttaaccaataagttgtgagtaggtgacaagtggccaggaacacaatgcgatgcaccacagcaactcttggagaggtggctcagaatgtaaggggttcttttactctccaatctctggatgtacagccatcggtgccctgagtctggataacaaactgtgggccagcattctcttccctcccaacactggccatgaagaacagtaagatgttgcaagttttgtttccttgaaacttggacagttgcttaaactgttagtaaaactacacacacacacacacacacacacacacacacacacacacacacacacacacacacacacagtgtcataggaaaaggccttgacctctgccaaatttcagctgggagcacatttttttatggacagctgataacctactgcaaacaggggttgataatggaaacccgctcgagccctcaactacagcgtgcactgctctaataaaaagaattaatgcagtcaatttgtaccactgttcttggaacaaaaaaccctgtttcaaccacaatcttttcaacagctgattggcagccctgtccatttcccctctgcagtgttgtcaggagtcttcaatgtgataatgagcctgtcaccatattcaaatagccctgtgacagcatgttttgtgagtgtgacgtccactgcaaagggtctgtcaaaaagcacctttcacagagtgaaaagagaatgctctcctgatgataaacctcatttctccacagataaaagacagagatttttcatcagattttgtcagtgttgtgttgcatttatctcttcaaatgttcctgctttcttcctttctttctctttttttctttaatgtacataaatttagatttgtcagtggtcaggacaaaaatgatgatgaaatacattctctttgaccaagtccatggagttaaccacagaaaagagaaggaaaagaaatctgagatccaaagaatgggaggccaccttgctactcattgcccaaggggtttctgcctgtggagctcagaacctgaatgcttcacacaccaaagccaagtgtcctttgaaaattacccacggaagttgctgtcttcaaaccctgtctccatgaggtcacttcaccagtggcatgaagaatccttcaccatgtcatcatattgggatgttccttattagaggtctgagtgtcactttttctgtgtcttatgaatactgggaaaatattcttctatgtcatttcaacttattaaatatttttatgtgcatctaagatgcatgaaagtgctgttgttcaaatcatcctattatagtgttctttaatatatggattatattgctacacataaagcatagtttaaaaattaaaagttaatacagctggcccctcaaaaacctgactcaatgaaaatatgattcacttgaaaacatgaaggagaaaaggaaaatacaattattgagggtaaatttttttgagtggcagaaaactatgctgttaaaaaaaaaaactaggttctctagaacatgatttaattctaccctttgtttcccccagctgatacaggccaagtctcaatgtgttcagcatgaatgtcacgtctttgttaggcattctctcaaaagggatctatgcctaggaacatgaatgggtttacacaatacaaatgtatatttatagcatgtgtacacaaaatacacacacaagtatatgtactatgtatacatgcccaacacagcaagtagatgtgactatgcattgtgaatgccagagtcttagattataaaatccacccacacgtggaaaagtaggatgtacctgaggtggtacttcttctgaaggtagaagagggagagaaggccaggtcacggaagcaggcacgggaagccagcaaagaactggcactcttcagccactttagggagatacacacatgcaaaaggtctgggaagctgctaagtgtggaaatggagctaggaatttaaatctaatactagtttcacctcagcttctctgacaaccaagaccttatgttgctaaaagcattgggtaaaagtgtgacggatagtagtacggtatgatttcattaacatcccacatttaactataagcaagcatttttaaacaagtcagtgaagacagatgtatggtaccacttcacattccccgctaggtcatggaatcaagcctatgttcacagccagctttccttttacattgtctgacccaggacaattagaaatctgtgtctggtcacagcatgtccacaccctgtcactattcaagagcagggagtttgctggaattttcattcccacaacttcacataacataatatcgcataccaccataccaggcaggactaaaactcaaagcaaaaaggatattttttaaaacataatttgtttactagataacaattagtgaaactaaaataactgatgagttttcagttgtttgcttgtttttcttcattacagagttaagaaaagggagcaagagaaggtcgagaagctacctgacacaggaaagtcagagcctgagaaaaggagacagtaattgagggtcagcaattcattcaatggctttaagttcatcacagggaggaaagtattttaaagccaatgcacaaagctgccaatggctgggcttacgaaatgtcctgttcttttgcctaaatgcttaaaccattggtttatttgggattaaaaaagggggggctataatataactgagctatacccaacatactcagcccattccataacactgaagatttacattgtctctggaagtcactgtcaccaccataatcctctcattaaagctaaagaaatgctggggtagcatttaaaaggacgaaaaacatttggaggcatctcgggctcacagcacctccaaatgaaggcaggcacattgcataatcccggcagcaagagctgctgacaggcggatgatttatgcttatagtcagaagaatcggagggcctgcagaggaggcagcatgagcaaggcggtggagagacagatgctctcagtgggcttgccggggctggcaggctccagctagctcaggtgcaacctggacatttaagtgctgaactcctattgccgacactccaaaacttggatgtgccgtttgtgatattatatgcaatgttcacaatgaataaaccgtcaaatgtgggccagcaccatgtgcacactgcatgcattccttacacacaggccgtgtgtgtgtgtgtgtgtgtgtgtgtgtgtgtgtgtgtgtgtgtgtgtggtatgtacactcagcatccgagtgaaaacaactctatttgtagaattattaatatgcatgtggaaacactctatagcttaaggcttcatggccctggaaatatttagcccaggtgtggctagtgacgggtgacaggacttcctaacaattggatcaatattaaagattgcacagtgggattaggagaaatgcacctcagcagaaaaccgacatctctgtcaattatattaattatttttcagatacatggcacgctttcaagacatttcatcctgagaatgcatttgaatatttgagaggaaaacgaacaggggacagataagaagaggagtccccaaaggagatcaactgctttgaaatcaatccttaaaaatacttttcctgaattcctctccatggccccaacaataacaatctggtaaagattatggtattggttgaaagggtagataaacctaattacagctattgatgacgaattactgctcctctgatctctagcagaaggcattagccagcatctgcatggtcagcatgcattctttgctgatggaacaccgatggacaagaaattcactccacggttcggcactgaactctcatcacatgtgtcctgttgagccgggtatgtggaaggcacagatttccaatgccaacaaaggggacaggcatccaaacacaacagcttcaagctctcttggatggatgtcttactttcagctcccagacatgggaaggtcagaggtagatctacctgggagaattaaagacctgggcctccctttaattaggtaagagcattcaaagacatgcaaattcccaagaagccactttgctgctgcagaggaggagagttgtggcattctgtggggggaggtggcaaatgggcttctctctcagctatcatctactaagagagcatttttgaaaagaacaaactgggatacatcctaagtcattcaaaatgcctctggactcgacggttctcttgagaggaaaaaaaaaaaatcagataacccgacgtcttcacaacagcatccaaatcccctttctaacttcattaagtggcagcacttagaaaacatccacaccaagcacttttattagagacgagccggtacaggcagggctcagtagtacatccacctaggcagtgggacacccggggtgccagtgtgggggtctgtaactcatcagtgtggcccactggtaaaagaacaaacaacaatgctgacacaccctcccccccccccccgcctcccaaatgaatgggattgtgtgccatgtcagtagggagaaagactgaagcatcatgtctgagctcatcagtgcactgggacgggagaaacaaaaattgaaatgaagctgatagccaagccattgtgtagcacattcccatttccccgtttacttcctttcttctctcttccattcatttctttcttgtttctcccagaccccagaaatcctcccaccactacctcatgcttcaacgtggacatccctgccatgacataacctggaacaaaactagcaggaaatggctcaggtgtcacccagaactgagatgacatgtatttgatagtctgtagtctattcgaagaagggagaagggagataggctgggaagagaagaaagagttaaagaaaatccctcttctcttcagcatgagcaataaaatccttcagctccacagctagagagatggcttccatgaagaacttaaggggtacagaaacgcaccgacagcataagctaccagcaccttaaagcccacgctatcaaagcttaaaacagctataagttttcagggagaaaataaagagaaaccttttagatagaggtgaacgtcccttcttccccaatggtccctacattttttttttcctgctagaagtgaaggaacacattagcatgtacaaaactgactatagacaccataagttacacatgggaaaaagagagtaccatccaggtgaaaagcaagccagagacacaaggtcatttggtccatgacagactttctgctgtcttcccacaattcacagaggggtctctgtgaatctggcaggttatgctgaccctgcctgttacctccagatctcccgggcacacgaatgggctcaggcaagagccacgtggtgcattacggaggacctctgaccctggcgagtcatggagagaaagcaatgtgaagacaacccaggcctgctgtgacactgcactctttcacagcaaagggaaaaacaaaacccaacacagagcaacgaggtgtcacttcagaccaagcagatgcagttggtctgtggcggagcaaagcaatgtcctaaacatctgggtgacagtgggaactgcagcaatacacatgtgtcagaaatccagctgggcatccaaaacttgaagaaacttacaagatctgtgcagaggaatgggaagagtggctgcactcgtgagagaaggcggtgatggagtaaaggacaaacggccttagggacatgcacggcaatgtcacaaacccatttctcagataatttatagatgctaacagagacatttttaaaggagaaaacttacaagtcattggcagcccaacaacttgataattccatactgaatgacatcgagaggatacattccaagtgtgtcaccatgggtatttgtattatgtccttggtttttgcaaagcatttcactgcttctggaattttgcagtgtgagaaagtatgactggctttcacggaccccacactcccatttctcttagccttgggtttctttaaaaaacactcagccttggatatagctcagtgcgtagggtgctcacttactacatataaggccctgggttcaatccttggtgtcatctaaaccaagtacagtagtgagtgtctgtaatcctagcacttgagagatggagacaagaaaagtgtcctagtgagtctgaggccagcctgggctacaggagtccttctcagaaacaaatgaacaaatggttcttaaatttaactgttaaaaaggagaaaacacatgaagcaccatgacttgggtatgcctgcctttttatcaggacattctccagctacgagggaaggaagccggaaggacaaggtctacctaattccctgcccattagctgctttccgatgtgcaaaccactctggtctccctggactgcttaagagttcagctgactccagccctgtctctttcagggtttcaggttaaaatcaatgcattaaccaaggctgctgatcaaactcagtaactgtaagttaggaagtgagagtggagagaacaggacaaatcctgagctttctaatctttgggactttcaaaaaggcaagtccccaacagaaaagaaaagaaattaagataggttttcactgttggagcacaaaccaagcacttaaagattcattttccagcatacaggggaatctccaagatctctttggactcatgacactggaacagaattcctggcattttactttatcaccattagtgaagtttagtttctaatatttttttttcaggcagtatcctatgcagacactaactgatgacttcaggggagttctagagaaagttctggatcatagagaaatgtctatttcacaaaacacaaacctgagcctgctaacgggaaacaatgaaagaaaggctgcaagcagagtatgtgatcaacaggtgacggtgcatttgtttctcagaggcagctcacaaatgcctctaactctagctccaggaaatctgatgccctcttctgggctctgggggcacctgcactcacatgcagacatacacatacttacaaataaaatattttttacgggataatctggttctgtagagagtgatacttgcaaaaatcagggactattaccaaagaattattctaaaatgttcaccagctgctgcggcactgaaatcatcctctcagagaattctttgtcactatactatatatctgaggaattaaatcaaataaagttgatgacacatgactaccaagtcaaactactaaaatcaaatcaaataaagtcaatgacatgtagataccaaattccacttgatcctggcctcacatgtatgaaggaaactctttgtgtgtgtgtgtgtgtgtgtgtgtgtgtgtgtgtgtgtgtgtgtgtgtgatttagatagtattttcagttaaaaatatattatttatagaaaaactgcttctgtgccaaacttctaaaaatgtgacttgaaagaatacaaaagtaggttggggggctgtattttattaagcatctattatgcaatcattattgaattaagtatcaagagggatgaaaatagaaatggaaagagtgtcccttcacacactatttttgctctgagatacattcagtgcagagcagaaatgtaaaacttcatagtatcacctcaagttttttaaatgctattatgtgataggtattgtactgagaacatcacatcaaaaaaaagagtatatttcaaattttcaaactccattacatagataaagcctaaaaaggtaaaggcactgtgagcatatgggcattggttgactgcttgcctagtgtgctggcaccctgggttctgatctcaacaccacaataataataataacagtaataacattaatttgttcaaagataaagttacctgttgggtagtcaggctgggatggagccaccatcccctccctatagacatcagcctcgtggggctgttaaatttaatgaaaattaagtaaaatcaaaagttgacactgcagtcatagtgagtatatttcaagcattcaaggattcatttcagattacctttgaccccagagtttatgctttttttctatatgtcttatttcctttccggaaaatgtgaagtcaaagcaataaatcatatgtcacagacaaaagatgatggtgaattaacagaatcaagacttgtatgaactgaagcattaggattaggactatgaactatggggacaggaacatccagcacgtttacccttcctctttgtgtatgtgtttcttttcctctccatttcccacattatgtctaaggggggaagctcagaatgtcaccaaggatggcctcaaacttctgggctcaaatgatcctttagcctcagattccagggaatcgagaaaaagaagcacattgctattcctgactgggtcatgttcacttttaataccaacctaatgcttggtaaagctaacagaaagggtgaatggctaaataaaagtggctggataaaagtcatgacatggacctaaagtatgtataatttggattgacaggtatagaagaggtcttggggggcatacacttcatccttcttctaggtattataaagagtagggtgcatttgttggggggcacagttacaagtacttctacagacaaaaccatcagtcaggaatccagattccttccaaatagttcacagttgtgcaggaattgataataacccaatgcctggcttgagaagcattgatgaaatcagaacgaaatcgtggttaaaagtagaaggaatgcatgaagctagcccaggcacagtaaatagcctcatttttatatatctctacctttcatctcacatggtcaagaaatctaaagagtttagaaggatagtccatggacatgaagatgatgactaaatagttcctggaggaaacaggaaaggaagagtgaacacaacaggatgcctggggacacaagggaagacactgagattctgtggcctctgaataagcaggtggaccttggggcactgtcacagaaggtcactgtgtttttagtcttgccttcctttccatttcatctcagttgttcatctataaaggaaggcgcctttcaaatagcagaagtcctaccaaccccctcaaaggcccccacgatgctcccacttcccaaaccttgtgtgcatccctctctgttaatggcataattcatgttcatgtcattcagccaagtaaggtaaaagtgagtctatgaatcagctccacatctgaagtgcctctcagccgagggacagcaaggactgtgccctggtgtgctgtctacttggataacattgaatagcagtggcaggtcctcagccgctgttctggtagccacaaagccaccctggctctcagaaggcacaatctgctgttgcctttggtctggtttgccaggaagcccaggatggactccccaccagcaccatcaggctcagggaatttggctagcaccaggcacctagacttctgccaggtaattggctttggggaagccgctgacctactctccactgagtggcttttgtggacctggaacccagcctgcttctcatcattgatcaaccttggccaagccagctggcttgctcctttgcagacagcttgccttagggaaactggttggtggcttctctctcaacctactaagagagagagaaagagagagagagagagagagagagagagagagagagagagagagagagagagagaaacacagagagaacacagagagagagagcggagagagacaacccccccacacagaaacagacagacagtgtaagagagacagaaaaagagaggataatgtcacttgattgtgaaaggctgaggacactcatgacaacacagagtgttggggctgaagatctacacggctttaacaaggaaggggggtacattaggtgtggaacccacagaactaaaaccacaaatgaagcactttactaaaggatccttatggatacaaaaccacgatatatggatttatattaaattgcaatgagttcatccaaacacacacacacacacacacacacacacacacacagagagagagagagagagagagagagagagagagagagagagagagagagagagcgctacctctctctggatgagaattctgaaaacttgtaaggaaaatacactacagcagaggctaacagaaccctgccccctgccccctccccccacctcacctctcactctactactggcttttctccgagcaaatgttgaagcaggttttcctacccccttggggaagaatccattggaggtattttataattcagaaggaataaaactgtaacgtattagatcaatgttggcttcctacttcatgctcaccagtggaaatgacaaatggagaacaatcaaacaaatgattagcttttagtagtattctaattaacagaaggggaaaggagcagggacactcatgccctgtgatttccaccttctgtgtcctgtaggacaggaagcatgttcttggggggaattctcagtgttacatttaggtagcacacatgctatctatcccacatggagtttaactggtctgttttttttttttaaaggaagtctatcgaaatatacagttgtttctgagacccacaagcacatagagcttatgtaattttctcatgtggaattttacatacagtaacacacaaatttctataataccagtgtttaaatattcctcctttaaaacaatggacaagatttgaatatcccagcggcacatcatggctagatcttcaaactatcaaggcagaaagcactcaaatatattcttctcctcaaagactcatttggacagaatctctctcaagttcaagttctagaaattgtcccaaggaatgaaattttgttgcaaggtgaaaatttcttctctgctccaatttggattgagttacaatctgacacagacaaaagccttagatgaggaatttgtgggaaaaccacaacttgaatattactggagggtggtggtgcatgcctttaatcccagcattcaggaggtgtgaatggggcagatctctgtgagtttgaggctagcctagtctacatagggaactacaggccagctaggccatatagtgagaccctgagaccctatcgcaaacaaacaacagagacaaaaaacaaaaattcaaagtacctaaattagttcaaatccaacaataacaacaaaaggaagttatttgaatatatatatatgtatatatatatatatatttatttatatatatatatacaaatacacacatatgatacacacataatatatatataacattatatatatattatgtgtcataatatcagcttctcataatccacagctgcctgtgaagagttataagtagcaagacctgaagcacaagcttgtcatcccacacttggatggcggagtcaaattctagtctaccctgagctacccagtgagttctacattggcttgggataccatgtaagaccaccaacccctaatataataaggaaaaatttattctgagctaactttatacttaatatctccataattcatgaagggaaaaactctattagataaacaggatgggtgatagacccagaatccctgctataaattcaagctccctggaaagtggaagaaatttggaagatctgtgatttccctaagcttgactttctctgtgcagagtaagcacctactgggtgtgtgaataggggctgggaatgatcattataaagattagtcaaaaagtaagaatcaagtcacagcacacagcataaagcctaaggcattaaatcctcaagacacggctgcctatgttaccttccacttcttgcctattcatccggagacagactattccagtggcaaagccacaaaaatatttcttttaaaaaaaggaataaagaaaacgaaaggaagaaagaaaaagaaaagagtccattggacaacataatgtctatacatggaataagttttcgtggcaccttagatacattcccaattggcttgaatgtcaagacaaagcttacagacaaggtgctctctgccactgcctatattataacttgggagttgtgtttaatgttctgcattaatgagggttctgcttgggacgggattacaactgtgactgtaagaaacaccagggaggtcaatgtagttctattaactgtcacccggcgcagaaatattttccgtgaataccattaaagccttctcctctcctttgttctcctttttgaaggcagtaggaacccaaacttccccagcaataatttctgttttagacttggcagcataatgatattagacttgaggggggaaaaatcaccttggcaatgtcttctcaggagacttcgtttttatatatataaattgtttttttacaaaagagattttgttaggataaattactaagcagactcattcaaggggtaaaaacaaacccacttgttactaaatgacccagcaagctttatattttttaaaaaggggaatctgcctggaaaatgctacaccttctaaatggccatttgattataatgggaactgtggaagccaggggtaattagagaaatggctgctctgtacaccacctgctgatagggcaaagctagaagatgctccgggctccctggccatagatggatcaggcaagagctggggctgcagcagaaactgtccagagataattctgctttatattctggggtgcagagcaaatgaccagagagctaggaccagtggctaagtgaataaatccccaacttgtgctctgccccacatattggtgcacacactcctctctctcagggttggaaatgggtaggggcacagctgagtgtagagttcttgcccaaagtgaatgtggtgctgggttccaactcccttactgcatcaaataaagacaggtgagagagaagaggaaggaggaagaggaggaggactagaaaaggggaggaagatgaggaggaggaggaagcgaacaggaggaagaacaggaagcaatgcagggccaggtcacgcgctcttctctgcatcagtccccatccttgtccttctcttcagctgtaccatccacttccaagtagcgctcacgggttagaattatgatcaaagtcccgtcctaggtatatcactcacgtatatatttgaggctccggctaccttgtttgacccacgaactggttgttttttatggttcctagaactctttcatataaatgaaggcttggggtactgctgacaagtggccagctgacccattgcagaacaggaaagatcccacgacgatcacagccatagcaagcttaacacagagcagggatgaacctgggcccaccacaaacacacctgacatttgattctgtctcctcttcagctataactggaccttggaaaattcactgcaattctccagaccttgatttccttatctacttaatgagaatctgacatctggggctccattgttctataacaatggctctcaacctatgggtcaagacctctctgggggtcaagtgatcctttcacagaggtcatctaagaccaccagaaaacacagatatttacattacggttcataacagtagcaaaattacagttatgaagtagcaacaaaaataattttatggtaggggggtcaccacaacatgaggagctataattggggtcacagtggttaggaaggtggagaaccccatgtgaacagtcactccttccagatatggatccccaccttgttttcctacttctctgtcaattcacaaatgcccaccagaaatcctctggattccctcaggcttgtgaagaaagatgcctgaataatatcaactaccttcactgtaggaacatattaacgaggtcaacattaaataagaagatctaactgaaacacaaagaagatacatattggtgatatccctcatttatttgtcccaataaatgactttttccagtttcaaacatacttggttgagcttctctgttcctacaattgccagtattttttacctcaaaaacatgacattaaaacttcaagtaatttctgactggcaataaacacagcaacctgtgatgagatttcaggtacccatagaaataaaaccatactgacttcacctcactgtcttgacaagacctggttagaactatgaggaaatacatagcaaaacataatgatcattgctttagtcctgagaattcagatactaccaactgtcccagtgtccacgcaactttcagttcagttaaacgtgccaaaatagcacagtccttgttctatgtatgggtgtgtgtctgtgtgtatatgcgtgtgtgtggaagaggacaaactcactttgctgagaacacctcacctacctaatttagaaacagctctcactggcatacagtttatcaattacgttacctggccaaatggttagatcttagagatctggatttttatgtgggtgctaggggctgaactcgagtcattgggcttccaaaacaaacaatgaactgagccatctccccagccaagcttctatcctcccaggaaaaataagaactatttaaagagcggacagtctaggagtgagtgagtccccttctcccccgttgcagacaaccatacagagtctcaggacctgacagtcttgctcatcctagtgcaggcaatgaggcagtcagaagcaacaatgcaagtgcagtatcttgtcagtacccaggcaaagctggaccatgagttgagtttccatcctgtggctttctcccactaagccacctcttcctccttcctcgtgggcctcttctgccctgtttactccatgctgaagctaaacaaataatgtacctagaagtctgtacttcattttaaaaagtgtaaagcagggtcatgggagaggtcttggtgcttaagtacttaccttgcaagcatgaggactagagttcaaatacccagaaacccaagtcaatgtcacggcctacctgcaatttggggtgtagggagagaccctgctttaaagcagaagacttgggagtgtaactgtggatgattccagatgtcaacctggggcctccacacacagcagaatgcatatgcagctatgcacacctacacacaacaaaaacatccatgtgtccatacactacactacaaacacacacacacaactggggagatgtaaaacagtattgggtttcctttcctctttgtttggtttgaacacagaaaaaggctaagctttctcatgaactttttaagaaaattttactcacagaagttacaaatgttcttttatgataatcttggggacacactctgaaagccactgacatcctcacataggacacattttacatgaagctggatcttgggtcaatatgatatgcatttccatacacatcctatacacatacacacgatgcccggggtcaggctcctggaatttcctgcttatcgaagcccagactgtgtacggagctccgaaactcttgatcatcatacacaactcgacaggcaaaaatccagcaagttggagaaatgtcataaatcactacacttctaggaagcaagtccaggaatccgtccaaattcaaagccttgtgtctaggcccatctgaccccaaagactgagcttgactgtctctggcagcattagcagtcatggggctgctcctttatgtgggccacagggcatggtggatggggaatatctggtcccttcttgattgcaatgctaaggatggaatctaggaagtagcatatgctaagctgtacacagcaccccctgcagtatcttcttcaatatccacaactcagatgttgaatctcagagttaaaaaacttcagtagcaggtttttgggggctggggaattgattcagttttttgaaagtgggtctaatgtaacccatgccagccctgaattgatcctcctgcttctgtctcccaagtgctgggattacaggcatgtgcaacaagacccagccctagtgtgtgtgtgtgtgtgtgtgtgtgtgtgtgtgtgtgtgtgtgtgtgtgtgtgtgtgtcaaaaagagaaaaaactctcttggaataaaatattgaaactggtacactgtattgcctgttttgttcacactttgcatagaccctgacatggctggggaatatgctacccacaatgcaagagtaagaaaaggcacaggctacctgactgccaggctctaatcctggcactggaggtggaagcaggaagatctgagtttgttgacagctccttctccaaagtatgttcctggacagtcagggatactgagattctgtttcaagaaagggaacacacacacacacacacacacacacacacacacaggaacatgctcattgacaccaaaaataccagttgaaacaaacaaaggggttccagctaacacttgtgttggagagaaaaaaattaatcatctctctgtatctctctctctctctctctctatatatatatatatatatatattatatatatatatatatatccataggcattcccttgtcgatacctcactagttctaaggttataggcctctgctatgcccagcgctttgtgggttctggggaaataaacacaggtcctcatgcttgcatagtgagcatcttactgaccaaatcatctcccagattccttgattggtaacaattatttgacttgaaaattctaatctgggctctggagagatagatcagcaactaagagctcttgctgctcttccaagggacctgagttcagttcccagtacccaggctggacagcttgcagttacctataacctcagctgcaggggatcttatgtcttccactgaccttcagggccttctgtcctcatgtgcagataccacaccaagacacctgattcagaataaaaagaaatctttctaacaatctaatctcaggcatcaagcctagttcacttagacttctggggccagcttatggagagactgaagttacaggcattaattcctgtgtatttttttttacccacagagccaagtattccctttcactccttgggcctatcccctcacagggacacacctcaattagcagagattccagacagtatgatcaagaattatcattttttagaacagtcaagacctcgtttttctgtaagctttcaatgaaaacctcctccattcccctcaggcagtactttatggtacacttggcgaatcgagtaaaagatacctgttaaagcaaggaaggtttccatcaaggctgttgaaatctgatttcatctcagactcgagaactaatgttgttttttgtttaactagattttgcctgtcaatttccagacctgctgtgccgtccgcctgtatggaccactgtggtcaacacgggggttgtagtagcaaattttattatggactggtaattgaattgaacaggtttacatttgaatagatttactacaccatgatctctgacatactgcacgggactcaaatccctgcacatccataaagatacgtttaagagggtatcaccctttccaggcttagggagtgagccttgagccacggagatgcccaagcataattgtgcatttatatgcagggtgcaacgctatatttcactgtattctctaagcctagaagaaaacaatattccatatttactcacacccatcctatctctgctttcggagagaagggtaacggggctcagagaaatgaagttttgccacccttgtgttcataaggaagtaaatgggaaataaattattatttgtgcatggcggcaacagcagcacttcccttgaaaacgcatcctccaaaggcttgatagcaagtgctgaagaggtgcgaatcacagataagcacagcccggtttactctgaacaacaatgtttaattaaacaccactcacagcctgccttccctctcacctcctagagactatgagaaacatgatctaagaagaaagacatgccccagttcatctttaaagccgaaagagcaatcagatgagtaaattacagtattgaaatcaaactaatcaaaagctcccatctccccagaaatggaggtgtgtctctactcacttcactgtttgaaaacaaaatgggcatctgaggtgtactcacacaaggctttcattgatacgtggcttccattgtatttaaacaaatggactgcttgtaaacgtaatgattattcgattctcagggctttgagacctttcactaacctttattttcgagcacaagtttagcttacatctccccattcagagtaaatggtaatataaatataaccaagagcaaaacccaactgtccaacacgtataattctgaattatgttttaaagggattttctacatacagcatggggaggggttggtccaccctgtgagttagtttctgtgtgctactctgcaagagggcttaaagcattgactaagcaaatgtataacttttaaatagttcatcatcatcatcatcatcatcatcatcatcatcatcaccagaacctaaagcagcttttctcaacctgtgggtcttaacccctttgggtatcaaatgaccctttcacaggggttgcctaagaccatcagaaaacacagaaatttacattatgattcacaacagtagcaaaatttgtgatgaaatagcaacaaaaataatttagtggttaggcttaatggtaaagggtcacagcattaggacggttgagaaccactgacctaaaggaatctggcttgtacttcagttaggttggtttgcttgttaagtcatgtgttcagccttgtcaaaaattagcctttgggcaatttcatatacatatttaccactaaccgagcaacttgtgcagcatgggagcctgaaacagtgtctggtgtgtgggaagagctgcatacacacaaaagcagcagatgggttggaaaccagagcttgtcagtgacatcatcctttctttccagagttaccctgtcaccagtcttcacgaatccctccttcctcatccctgagcttctgagacccaccaacatgggtctgcctctaccattcttcctcctggtgggtctcgctctccgcctcgtattcatagattacatatggtacatataatcaaatcagggcacatctttttcctttatttttttctgtttgatattctatcattgtcacctgactgcaatactttaaggttacaagtttactgacagctgctttccaaggaaagaaccaagctggagatcgaatggagaaactgaaagttttactttttccagtagacaaataaaggccagatgactagggcaggaatcccatgtccctgaatttgatccgttgtactaattcccctaagagaattataccaagaaggcactggacaggtacagacgggtgaaactatgcaagtctagtaactaggcactagtgatgcccattctcgtttgcaaatatgagaatgtaataaaagaaaagggtgaggggtcaagctctgtagtggcaattacataatttctgatgtagcagaatctatgcatttctatgtatagttaacttgagtttcaagcacccttccatgcccacagtttcatctggtgctttatgaaaacatcatattcacttaaaactccaatgggctttctgaatacaaagagtgtagaccatgcacagtatgtaaaatatctacaaaataagcatgcacagagattcatttaaaaaacctcctaggggtaggtttctcagagaaaaggagtcaattttactctatctatctccaagctgaattattattttgcctaagtaagctgaaacatacaagtccgtcaggacctctgacacacgtgggagaggagaatgtgctccacagccaatgggttcccttcctgctgcaagaatgatccaatatggaagctcatgcagtgtggtcagcacagagttcacatttcctgagttggccttcttttgtgggtgctattcctcgctataaccaagcagagcagtcatagtgccaaagtctgagtgtaaaacatcggtgaaagcatgtgctaaagataagtttggaaaacaatacattagtccttaaaccccaaactggcttacagaaaatgagaagaggggggtgcaatgtgagaagcctcttgatgtgtctccatcttcttccctctgtaaactgtaaagatcaaaggaccgggcctgttggcacaattctgttcatatcacagggtcctaccttctggttggtgtcaagctgttagccatgaggtattagcaactctttaagtcttctgccatcagattcgggctacctactgacccaccttctctggttgctttggagctgctcttgacccctgttctgattgccaccccccaggcccccaaaccagagcatacattctatgcaggaccacttaccttctttcagcatgcccactttgagacacttcatgaagcgacaggcctggcaggatttgcgtctgcgctttgtgatttcacattcgttcgtggctgggcagctgtactctatgttacctacagcacagagtgtgagggaaagagacagtcagatcggcaggacaggagatggaggcaaaccaaagaaaaggttaactttggcaccccgacccccaaactcatgtgagagtcatcacaaatgtgacacgtgccaggaagctggatatggggctgtagccatagactgcacctctacgggagcagcttgacataaattagtacttccagagaggctgaggcaggaggattgccacaagtccaaagcagcttgatcaacatagtaaattctaggccagcaaggacttcacagtgagactctttacagaaaaggggagggaggctgatattagcctcttatgataataatgtacttaaaaatttcttttgtattagaacattttggaagacttttattacgtgtgggattgaggcaacaaacaatcactaagcaaagttgacccacaccaaatacagtcttttagaagagattctgaagccatctgtgctcatataaacataaacagcaaagtctggagagatggatcagtggttatgagcactcaggctcttatgcaggatatgggtttgattccagcacccacatggggctgcttacactgggctgtaactccagttctagaggatccgatgctctcttctggactctgctggcacatacagacagcagacacacacagctacacataaaataaaagaactaaatttaaataaacaaacaaaatgtcacatctggatcaccgtctatgaagactcgggctttgggacaagctgcatgtcctccagctgtataaacctctcagggctcagtgatctgaagtttattgtgaggcatttctgttagcacctggcctgcagggcaacaacataactcttctgccattctggccaggcggagcttcccaggatgctgaggatgacgatggtgggaataatggctgccattgctattgccatcttcatggtgcttgttacattatttgcatgattaattccaaacgccatggagtttccatgacgacacctttttaacagtagactgtatcattttcagttatatgtaacaatctgaagtgaaaaacatgtaactggaagatctaaactttggatgtttctctgagacaatgaagtgtgtggggtgtgctccgggcagctgcagccttgtaaagaagctgccttgaaaaataaaggctgtctccactgtcagccccttctcagagtgcttgaaggtctctggctacttcctaaccctttcccctcgtgattaagtgcattagtaacctaatgaaaatgcatcctgcttattgccctcctgggaagggggaggtcatcgcaccgaatgcataaattgtcataggagagggtccgggcataattgcaattttgctgttccacgcttgctgtactcagggtccatcgagtcccctgaaacatgcgcagatccaagtaattagcatagaaggctgcctgggaccacagcattgatgaaatatttcagagttaatcacactttgtaaacactgatttatattgactacctttctgtggactgatgccccctcattaaatatcacattagtgctttgcaggattgctcagcgactccactactcgccaactgctaattcaccaggaagtgatacctagccacttggaactacagaaaattggttaagtatgcatgacttaaaaaaaaaaaaaaaggcttgagcattataacctgaggtaaattgactggctaaattagcattctaattcaaagcaactacctttaaaatgaggttagataatagaagtgatatcaacggcattaacaggagtattcaccatcaccttcttcagaaatatcactcaggggctggcgagatagttcatctgggaaagtgcgagctgcaggctaaccatgtgagttcaagccccagaacccgtgtgaaggcagaagggaagaaccaatcccacatcattgtctgctgctcttcacacaggaatgccagcgtccattctcctcatattaattaataaacatgttttaaaggaaaaccttactcaggaaaaggactggcaaaataggtcagcagtaaaagttgtataggcttgaaaacctgagtttcatcactgcataccacagtggaaagacaccacacacacacacacacacacacacacacacacacacacacacacacacacaaataataatagtggtgatgatgatgatgatgatggagacaggcaatgctaaggtaagtaaacactgacttggtcaaagctgagaataaagagatttggaatctgagcagtttctttcaaatgtccccagaaatctattctgtatcaaaagaatggcgctaaattttgtttgtttgtttctgtttgtttttggtgtggtacagtgaagagaacctgggaccttgcaaaagtataacaggctagcactgggctatccccagccctgttgaattttattttgaaacagtgtcacaaagttccccgtggctagcctgagactcgcactctttctgcctcagcctcttgagtagctaccaccctggctgctctctggtaatttagtgttcagctaccaggtccttatagtctctatgattcttctcaatgtttatttcaaaggaaactaacatattctctcttagagagaactgagcaacaattacaaagactggaaaaattctttaaaaaaaatctttgctggccatttcacgactttaaaactagtgtggtgtaatacatggttcgaattcccattgaggcgtaagtgttcaccccatgtcttcaacggtacaaatgtctgccacatggcacactaacacacacgtttgtcactcagtccctcttgggtgatgatgtcctcattcttcatggcaggagactttgaacagggactctgtcaggcaggtgcaggctcacacctggatctgtaccgtcctcctgatcactggcctccactctgcttgctctagtctgggatgggtgacctttgcactgtctcttcccatgactgccttgatcatgtctctgccctaattttaaataaaagagctccgcttggtgttcacacacctatatcccggcacttgggaaggaagatgaggcatggggattgccatgagttccaggccttttggagcccgcaataattaatagaataaataaaataaaatcacttctctaagatatgtaaggtcttatgtttgacacccagcaccacacatatgtgcatatatgcgcacatatgtacacatgcacactactgctgcccttctgaattaaatctaagctagccaactgccacacaaggtcctctcccaatctaactctcatctacttttccagaaatataacaattattacctcacatgaacttccagatgcagccaatttgatttattcatttttttgctgcatgtccttcaaagactcccctctgagaatgatctatttctgcccctattttcttcttaaaattatttccaagactcagtgttcaactccaattccagtccaatcatttatgaaaacttctcagaccattccagaaagaaatgacttctggggatgcctatcttgtgggatactgtcatctaatacagacaggtcgtattttgctagccctttgcatatgcatgccacccactagacaggaagacagtggaggacaggagccaattctcaggaagtatgaacatctccaaccaagggctgtggtgactcaggaggagagggaggcaaggttggtggtggtagcctatgcttgtaaccccagaactggagaggcagagacgggcagatctctgaagctcactgaccagtcagtctggcctaattggcaagccacaggtcagtgaataagcttgtctcaaaagaagtggacaagtgtctgaagagcgattcccaaggctgacctctgtcctctgtgggaatgtgtagacatgtatgtgcccaccacatacacatgctcctatgttcacagagattatgcttaggaatgtcaattacttcttcactcagggaaaaaatgtctgagctaagctatgctttgaaaaagatgggtcagtaatgacactggtgtaaaggagacttcacaaagccacaggaaatacaaagccgtctttataataacggcccctcagtggtgactggagtgcagctcagtaggaagatcctgggtgcaactccaccaccactcaaaaaccaagcttgagacctagaggtggaggcaagagaatcagaggttcaaggtcagcctgggatacaaggatcctttattaaaagtactcttttttcacaaaacagttctacgtgcatatatcattcataatatatgttatttttttcagtatatatccaatttaggtggatagaagttaggttgtttacaatggattaagtatcctcttgaaccttctgtcttcgggaagtcttaatacatgaagatgataaccttgatctcactaagtaactctggtttatatttgtgaagacaaatcagcatcactctctgaataagttattgctagaaggaagcactgtggttgtctgtgggcacccagctgccaccgtctttgatccatgttacaggctcagatactgtacccttcaaataccttgcctgttgcttttaggagtcaagagaaaggaggagttttctatttgaaatgggccaccccaggcacctggataacaatgcagcagacactttggtcatggttcaaagactttcttcccactggaccacacacagcctctctatgggacacttgttttcctccaagtcactaaaagtagaaactagacaaaaataaataaataaataatagtaataaaatgttttcagtctccaatgtgtttgggtaccttgaccatttatcctggataaaaacagccaggggacaggagaaagtactgttccccagcccagcagtcttgttgaagacaaagagttttcatagattatagctcatgattttctggggcacatttgttagatggcactagggactgagctgggcagctcctaactcaagcgctggaattttccaggttttgtcactagttgggcaagtgtgctatgctgtagaagagtgggatccacatggaagcaggggtggggaggggggctcttaaaaccagactgaccagactgatagcgcaatttataatatcatctggcaggtctttgcaacgtcctgggctctgggtacttatttcggagtcttttgtgcaattagtttgcaggcaatataattttctcacttactgcttaatacaatcttacagcttctggcgggtggaataacagggtgtgtgcagagctccagcctagagtgccagtggataatttgtagattcctttcagtcacttaatggacttttacattttggcagtgaatgggctgaatgatggaaattagcatggcatctcaaaataaaaatacatgtcaagtctttactctggttcacaaccctcccacagggcagccatcctaagttagctctttcttcagtcatcctcacatcatcatgataaagtcaattccaaagctacactctgttcaccctacttgttttaattttattaacaaaaccaaatggctgcaggacactacaagtgggatttagacaattgttcctcaatattaagtgattttaaaacaatgggcttcgctttggtacccaattatagggcatcaaaagtgtgaggcaatcatctgtaggagttttgtttttaaataccctaaatcatagaaaaagaaaagggaccaaaaaaaaaaaaccctttgtgatgtaatattcaagtttgtttgtttgtttgtttttgttttgctttcatttttaacccaacaggactttcttttttccttcacttcttgcttttaattttctttttgttcctagctgttttctgtttgtcctccattaaatagaaaacaccaccaccactatctgtagctgagatcagacaatatgagctctttgttacctgtctgtaacttttcaaatgtcataattacatcatgacacatggcagtttgggggagcactcgcctatgggcacagatgtgtggggtgcacaaaggaggatgagtcgttgctttcttttatcactccccactgtgtttctttgagacagggtctctcactgcacctaagtctcacttgttcttttcggctaggctggctagccagcaagccccagggactctcctgatgtgtgttccctcttccctcttctttctctgtcccctccttccccatcactagggtcacaggctgccacaccctgcgtgtctcccccccccccataggtcgtcaggatttgaactgtagagtaagggtcataatggcctcatggcacacactgctgagttctgagcatgaagcacaggcctaattcctgaatggaatgaaatatgccttacagaaaggagactacaaagtgacaggtgattggctgagtcagagaggacaaggataaggcttaatgggaaaatgctaacctggtatgcatgaggccctgggttccaaactcaggcccggcttagtcaggcagggtgacacatgccagtaagtcagggaccttgaaggcagacacaggaagataagaaactcaaggcatcctctgccacatggggagttgagttcaaggtcagcctgggctacaagagattgtctaaaacaaacaaaaagcaaaagaggtagccctctatcctttctatagaatgagaaattactgtcaggaataacatgccataaaacaagagcaaattatttggccttgattttttttccagtttaaataagatacatcctacctcaatttccctgaatgattattcctttctgcagtaactctttaatattaactgggtgcaaggtattgtgattacagggaaactggaagaatcatgtatgacctttggaaagccaccattagcattttaactagcctgtgctttaggaaagaatgtgacaataatgagtgagggtagaggaggagacaagagagggaaacaaagaggttgagaaaacagtaggtttagctttgcattccagttgcgtggtgtatctctgtgtgaatgtaaacacagacttctcagttttctcaattacaaagaaccacactgttttgtgtctgttaggaattatatgaataaagccttaatcgcatggcttattgtctgtctccacttgaagacctgactctgagtttgagaatgacgtaaaactcactctcaagttgttgtagtgatacattcctgtagttcaggaggcagaggccggaggatctaagcaagtgagtagcaaacagccagggctatacagtgagagcctatcattaaaaactaaacaacaacaaaacacaaaaactgtaaccaaactttctacaaattcatgcaaagatgtgaaaatgaaggaatatcaccccttggagacgtgtgaagaacattgttgtcttgctaacaactctacagctgatatagccactaaggaggagacagggagtgcttgaatgtaaagacagaggatcaagtcattgctaagatcatctatgaagtgaatctcaggcatatgagccatacctccttgtgaacctccctgtccactcacagatcccaggccagtgattgtcattgaacatgacctggctatcactgtgatagaaggtcttcaaaactctcacccctgctccagaccccaatgtccaccacctttgtggaggtctaggggctccagggagcatctttctctctcaccccaccccccaccacatcctctgtaattgtatcttctccgctgttctcctggggctcccaacatggagttaatggtcctgatgctgacgaccttacctgatgctcacctttcagggagcttttccctgcattcacacagcttgactctgtgtctgggaactgcccttcagtccaagctgtgtattcctttaggacacagaaattctagggctgtgcagtgaagtcaacagaccatagggaacactcactattatttttttttcaagacagcgtcataatatgttgtccaggttgaccttggcctagtgaaccttttgcctcattctcctatgtaatcaggcttcaaggaatatcccataatagctatgttatccatcactttttagggattctgttctttcctgtcccattttagagtttactacccaattggtcacacacaaaaaaaaaaaagaaaaaaggaaagtttgtgttaagaaagtaaagaaaccctatgttctctgttatgtggaacctagcctatacatgtctacatgtatgaacatatgtttaaaatgtacatgtaggtatagcatttagaaaagagaacacaaagggtaaagttttagaagattagatacttactaatgaggtctcaagctgagcacattgctcataagttgtcttcaaagagatgctactctccagttgtttcagccctgtccttcagcagtccacagagggatggctgtacactgatttgtcccctttacaaaatatcctgacatctgccccagtgatttctaaaggtgccgctgaaaattcaggtgccaacacaaaggactgtaaccacatacaccaggggtgccagctacccttgaatgtgcacacaggaacccctacagtgctattgggagctttaagcccaggagacgaggtgacacaccggaatcacaagtgccagaggcaggttttgaacccagaaagcttggctccaaagcctgcactctaagtacaaggcaattctgcttaactctaatctttcaaaacctattgctgactgtcatttaaagtagaaaaaggcattgtgcatgccttgtcctctgagcagtttctttttgtagctcttgttgctaccattgttggacagaaagggcctttggaagcctgacacaagcccaggaatgagaggatgagggtggatcttggcactgtcttttgctgttgtcagccttgtgggagcagggcagctgtggggtaggatagggttgcttttaggagagtggaatctctcaacacctcaggaagaaatccttcatctagtctcagtgcctctatggtctgtgtccagtttaattccacagaaaccaaacagagcaagtcaccagagcaactggtgtcatgttgtacacaaagcattttgaagatcccagaataatgctataatgctattgttcccaaagggaaagaaaggactccatgatcaccagggcatgttctaaaatatattttgggggtatgataaatgtctaccaaaatgtatttgttgcagatacgtgtggtgcacacacctagtactctagcactttggggagactggggggggggggggagggatcttgagttttagtctagcctgggctatgcagtgatatcctatctcaaaaaatcaaaatgatgaaacaacccagggctttatatttgcaaggcaagcactctctcagtgatctcccactaacccacacctcagttttatttctataaggctaaggataaattcacagaagtcctcataaaaggctcatgactaccacaaggaagatgtcataccagagctgtcaataactgcagatttgctgtgttccatatccaacaacatcttttctcttctggcaagatgtaagaaagtctacatagctgtcttctaaagtcttctaaaacacataagtttaaaagaaaagatggacttgggagatgggccagtggttaaagagcttgccgtgcaagcatgaggtactaaatttgcattctcagcattcactttttaaaagccaggcatggaggcaacttcctgtactcccagggctggagaggtgggcacaggagtgtctcatccatcagcaacctccaggttcagtaacagaagaggacaaaggcaccggaagtggccccctgctgcatatgcggtgtgttctcatgtctctcagtgctctctggactggagtagtcatcaggtcagagtgtgggacatgatcttattcactgggaagggttgctcggaatcaaagcacaggctgagggtgtagctcagtctacagaatgcttacttagcccgggtgccatgctagcactgtgtaaaatcagggaggtgtaagtcagaggtcatccttcggccacactctgggttcaagatcagcctgggccgcaggagtattcctgagggacatcttcacagaaatacattaaaatgtgattatgtccacacctttctagataaaccaaacaaacgtaagaccggacttgatatcacagaatggaacagttttcttttgtaataagaattgaaagttctcctccttctgaattatattcattattacaaaacaagaaagagacaaaacaccaattctgagctgcccagtgctgtggtttcgaagtttctatgagtagactgacattctcacaccaaagcctgggagtcagccacctagaattctcaggggggaggtgcttgctgccaagcctgatgacctgagttccatccttagaaacccacaggtttgagagaaatgactcctaaaagttgtctactgtcctctatacatgcactgtgccttatgggcacacacacacacacacacacacacacacacacacacacacacacacacggggggggggacacagagagacagacacagagagagagagagaaagagagagagggagacagagagacagacagacagacagacagacagacagacagacacagagacaaacacacacagagacacacacacacatatacacacacagagagatagagagagggagaaagagagacagacaggcagacacacacacacatacacacaaggcagggggggacacagagagacagacacagagagagagaaagagagagacacacacacagagagggagagagacagacagacagacagacagacagacagacagacacagagacagacagacagacagacagacagacagacacacacacacacacacacacacacacacacacacacacaccaataaatatataaataccaacaagtaaatacataccaaccaacaaacagaatgccatggacagccaggtctggtccctcatccctgtaatctcagctctggagagtctgaggctaagagattgctccaagttccactctagcctgggctacagaatactaccaagcaaactgagagcaaaaccagcctttcctgtgagagcaaaggaagggacccatgacacacagaacatgaggacacacattggtatggtcagtctgggaccagccgagccatgtgtggaaataaagggcagcagctgagtcctcaggggtcagagacaggaaaccaggtggtgatacggcagcgctgagccctccagctttaaacttaagggatttctgaaaacgagtgataaaacagtaggtatttttaagccttaagcctgactgtctcctttctaaagacccttaatattatctaatcataacttttgtactagtcttaattccctactttcattttattttaacaacttaatgggaaaaaaattgttcacggaccacaatctctccagaaaaatagagcctaaaattacccgatgctttaaagtcctttaacatgtgcaagacagtgtcacagctgtgggttctgattctcctgggaccgaatgctttggtcattgtatctagaaatggtaaaccctactatcctgggatgctaaagaattaaggttctgagatgcattaaaacaacatggggacatgataaaactaatatattcagtattggggtggacacattctcctcttgcaggggaactgattaggctcctggcaaccatgttgggcaatgcaaaaccacctgtgacttattactattccatagcagtgaagactccatcaataactgctataaaacatgtatagaacatagaaaaatatatagactgtctgtttatgtaattacctgtgaataaatccaaagaggtaaaagataaaaaacaaacaaacaacaacaacaaaaacctttaaatttgggcaaatgtaaaattcttcaaaaacagtcacctcaaagctattaggaaatccaataaaatctaagaaaaagaaaggacaagtagtgtgttagtgaaaatgggggttggcaaagtgttgtggaagacagtgaagatttcctcaaaaactacaaaaagatagttacacctgagttagtcatcccattccttgatacatattcacaaagattgcaagtgcattctgggacgggtgaggctgggattgaactgagtcttacatatgtcaggtgatctatagctaagctatgtcctccatcttgacacaggaagtggaaactttcccagggtcactttgaagaagctatggagtccaggtaggtactcaacatttggatcttctggtctagccttcggatcagaaaatggcatcttgtgtagctaggtacccaatggcatactcattactttagtagccagaagatagaaacattttaagtgaccatcaagagatgaatggattcttaagaaaaaaaaagctacaagtacataatggaatattacccatttttctaaaggaaatgatagaacataccacatgtcacagatggaccttgagggtattaaaatgaacacaaaagacaaacactgtggattgggatttagcttgggcgtggaacacttgcctaccaactacaaggtcctgtgttccattccttggcacatgaagaaaaatagtgcatggtccccctggctattggctctgcctgtgttctgtgtctgtgtatgtacactcaaagaaacagaaagctgagtgtacccaggcctgctggcaggaggacaaatggagctatgtcaaggccacagagtgtgagggtcacaagattaaactgtaaaaatctgctacttagccatatgaatacagtcaacacaagtggctaaggttccaaatttatgtttttgttttaccataataaagttaagctttaccatcaaatttactgattatattcttagagattgtggatggactccatgggagaacatgagtatgcaaaggcatggcttcaatgtccagcaccaaatacacaaatgtacatgaatgtacctcagctgtaagtaccaaaattcttcaccagaaacgcttattgaattttgttttaggtgaaatttctagaacatgggaattgatcatcagtgaccaggatttgtgctttcccatgataatggctgaacgtggattaattcagttcataagagggcaattaataaccattaattcctaagatgctaagttgattaagtaaatcagaaaactgtaccatgactttgaacttcatcatgaagagaaaacaacctgccctgtgcctcaaaatttgtctgtttcctattgattgattaattgattaacccgttgattgaccgttctcaggacagaactcagtcaaggactctaccactgagtcataccagcttccctgcactttgacttttaacagagtgtgtttgcttttttctgagcctgaagactcatattaacccacatcttcttcattaatcatcagaaagtcacacagaccaacaggctttctggagccccaatctcatgatttcatgacttctttgtgtgtcaccaggtccttcaggtggacattcgaatctattccaactccatttatctatgactaattttgcctttgttgaaggaagagaattgtcccattgtataaaaaacaagcatttttcaaagccacaaagcataaagttttattcataccagcttaccctacagcatttaattgtgtgtggaggctgttcctaatgagatctaacttgtcatgactaatcaggtatggtaaaatgcagacaaagatatcactgcaagttcaaggctacacagcaaatctttgtctcagaaaacaacaaaacttcttgaaatagtgtgcctgtaaacctctcagaacgctgagagttgagacaggaggacttctccaagaccaaaacaaggctaggtgtgaaactttgtctcaaggaaactaaggatttcccatgcttaaaagacttggcttctagtcaagggagaagaaaagctatcaccatgtcaacaaaggcactagttcttttgtttgagtttatcttgtaatcaaagagtagcctccagtctcttcatcagtcaacagttaatgttgattatcctgccaggtgctgaggaaaaggccagagaactgtaggcaaaatatcagatacactccacttcctgagaaatcccaacaccagggaaagcattctactttgcaaaacagccagacattgaactgaactgtcccacaaagtccctgagacttggaagaagcaactcaaacttcttagtgctcaagcgtgttcaagcagtagactgtaccaggctaaagaagcagaagtcccaggaaaatctttggaataaaaaaggcagccggatggctttcttccagtgagagagtgcctcagaagcaggggtgtgtgaggagacaacattgagatgacttctaggggagaaagcacacctcctgcactctctagtcccaggacttgacctgagcttctaatcagagatttagttaaacagaggtttacaagaatgaatgagagagatgtaaattgtgattgcatgatgagccaggggccggagggacggttcaatggttaagaacacttgctgggcttactgaggacctgggtttgattcccagaacatacatacatacatacatacatatacatatatatatatgtaaagataatttattattaattatatctttatttttctagatcctataacataggtcctatttcaaggacactaattcatttacccatattagagtttcatttaaaaatacaaagtctgaatttttagagatgactaaaaggcttagtactttttgttttcagttaaagctattgcaattgtgtcattgcaattacagtacagtatttttattttggagacattttctgacctatcccaattggcctggtaatcactgcatagatgaggaacttctgatcctcttgtctccaccttcagagtactgggattccatgcatgttccaccatgcctggattttatatggtgcgatgggacccaggacctcaggaatgcaactgagtcatatccccacagcccttgccataatggttcattgtagtgctggtgacagaaggtgggactttgtgtatttcagggaatgtcctaccactcaactatatacactctgcccctaagatatgttaaaaataaaataataataataataacatgttatataacattatgatatgttcccatttctttccaagcactttgaaggggcacaatcgtgggacttaggaccagacactttgcacacatattactgaaaaagttaattctgttgcttgatttgaaggtgagttcagttgggcatttaaatgtggtattaaatgttttgttacagccagtagtgtagctcattcaacaacatttgccttgaatggccaagacccttggggtcaatactcaacaccacagaaggcaataaaccagaaaatgtttcactgccgagtgttagaatttcttctctgaatccctcatgcctcaaacatagctgaattcttacctactgactcccaagtggaacagacactttaaaatccagacatcaaaataacatgcacattcaaggggctttcaaaaacacagtgggtgctccctattcctaaaatactcacagaaataatactaaatgttcttgctgttgtagtgggaagtttctcccctaaaagcagagaggcaaaaatgtagtgagggtcactgagttcatgttttccagtcccagatcaaagactgcacacattcagtaggtagtgctattataatcctgatgctctggaggctggacaggagaactgagagttggaggccagcctcggctacacagtgggaagatggcacaggcaatctaatctctgagagtaatcactttggctttatgtaatccaaaaagccaacattctaagtcaataattaattactttatcttaatttgcaatggttttgtcttactgttcactagctaatatacatacacatgtttacatggaactatactcatatatgtgaagctatactatcacacatgtgtgtacatgtagccatgcatatatacatgagtatatgcacacacacacacacacacacacacacacacacacacacacacacacacgggtatatatatacctgtttataaaaacacacatgtccatatatacacagatatatgcatgcacatatatatgtacacacatgcatgtatatatatgcacacacatatatttatgtatacatatgaacataaatgcacacatggacatgtatacatgcacacacatacatacacagatacacatatgtacacagacacatgtatcatgacattcacaggtgaatagtccacactgggctaaattagtaagaaaacaaaaacataaacaggaaagatactcaaaaattctgatttttttcttttttttttttgagacaaggtttctctgtgtagttttggagcctgtcttggaactcattctgtagaccaggctggcctcaaagtcacaaagatccatctgcctctgcctccagaatgctgggattaaagtgtgtgccaccactgcctggcaaaaactctgattcttaagaaagtaaaaatattcacaaagctggggtggcaatttaaaagaaactatcaagatgaacttacttaaaatttgaacgcccacttaaataaaggacacatataccagctgcctaggaatcctgcagtgtgcaccgattgctcaatatgcctacatagttgccagcagagtgcgtgggtctagacagaatttagcctactatggccaggaagtccaatggggccctgcccttgtgtccttaagccccaagttaggagcactttttgatttttaaacagctcaagaaataaaataaagcagtcagtgaaggacagagaaggtgtgctgcccacacactctcggttagctaatatcctaagcaggttagggtctgctgcctggtccattccagtgtaagtctgctgaccaatgaccttcaaccatccaagcaacagaacagcttcctggagagtctggacaatcctggggaaatgcacccctacctgctgactctctaaatcaaaacacagaagtgaaaggccctgtcttcaggacagtccttcacatgttatctccccacccacagggaatggcagcaatactcttcctatgaaatacacagccagggataatggaggcatgagatcacatctgtaacttagaatttgcaacattaatgcatttcaaaacagattagccataattagcatcaaatgaaaagaaaagcggaagagccaattaaacttaccacaaaaactagttcaagttctaagttaaagagaatgaattacagagagcaattcttttgaaaatattggttctgccttcaattctgcctccaagctgataatcacagagattcatcaagtaaactctcagacattcctgtattattttagatttttaattatgaaacatagttgagcttttaagttgacgcttactataaagttctataatgatttttttccctatgaactatttaagtaggagatgtttttatacatctctttgggggctcatacgatgtgcccttgaagtatgtgattcttattttctctactgctgtaaatggcctggtcaaagattacaattgggaatttctccaagaccctccaggaccataaggcctgcttccacaaagagttgcaaaaaataattcacagttcagaagccattggcagcaccagacacagggccaccagcctacgtgccattccttttcaacacaagccctcaggccagtgtcaaacctgcactgttagggtgtacgttgggattctatcaacacactttgtatctgaggccttaaaaccctgaagaatgaccttatatggagcctgaaggtataaaagagacaacatggaacaactttgttctatagcccagatcctgagtgcctgtgagcctcaatttgcctgactagatggcacaagctcagccaaattctgagcaagctctctgctaagtccgtcttctggaggtgggccggaactacgtgccatggctggtgtgtaccgttctgagatctgtgagggggcctggggaagatgtttggagggggttagtgggcttgggaatattgagcaaggctttcaacacatgaacagagcaagagtgggacggaggtgggaagggaaagaggttgagctgtcagccacagttggacacatcttctgctactactttgagacacaaagcctcctggagttcccaaatgaaatgtgcagaatggatctcctgggcactgcaagtgtgtttggtcctataagaacatcggacacttttattcagcagtaaatcttggcatatgactttaacgtatttacacatatgggatgtcacttctttggttgttgatggtgtggtcagaacattttgacaagtactggaccaggcagagattaaggaccttgggacagtaagtatgacttagggtgtgtggtctatatttgtttcactgtttccttgaacttttaaagctgttttagaaatctgcaagttgaaagtactttcttgagccccagttcaaattaaaatccatcccaatagtgtgctctctcctctttgcaacccttaaatcccacatggaaactgttttgtgcatgtgtgtagtttgcatgaaagaaaaaaggcaggaccatgcatgccagagaagcacactgcccctgagctacattctcagccctttttttttttttttttttttttttttctaacaggatgtcactatgtagtccaagctagcacctcaaaccccatctgtcatttcagcttcctggggcttcgaggtttcaagcaggtaccacattctcagtagggaactcaatgtttaatgcaagttccgagattctgtgtctttatttaattttttaccatgtttttgttttgtgtgtgtgtgtgtgtgtgtgtgtgtgtgtgtgtgtgtgttgacagaaaatgagcttacattgctagggccttacatatgctaactaaactttctaccacttgaccaacaagcactgtccatttcaagtcctatattcttaaacatataatttcctgttttgaaatggagggaggatttgtgtctaagaccaattctctttattctaatattggaataaaaactttagcaaccaagtgttttctgttaaatgtattgatttcttttgtgtatgttttatttatttttttttaaaaagtccatagaaaattgctagggacaaggaaaaggaaaaacaaaaaccttccccatttatatatgaattacaaccaaaagtagagttataaaacaacaaaaccaagagtaatggcatcatacctcccaaatgaataacaatggaaacatggcagccactgcaatcctatcagttgttaggtttacatttgacaggaaagtcaaagcccttgcaagtcctttctgagtatcttaatggctgggggtgtggccaagtggagactacagtcaaagcctgggttgcctctccagctccccacaaaaccaagcaaaaagacctccatagtaaacaaccttgcatctttcccacttctgatcttatccagtagttccttggaaaaaattagtaaataaaataggcctttctaattggcattcaatgaaatccataattaattgccttttcaagaggaaaataccatagtcagctttgaaagaaccattctcaatatttttgtcaaagcttgcctggatataagtttggttccaaatttaagaattatttggtccttgtttttgctctttctgttgtttctttaaggtgttcttactatgtaaggcaggctgacatcagatttccagcctcctgcctccattgttttttctacaacttttaaaaaatatgtctttattttcaagatttttaattggttttattttcaattttagagttgggctacattgttgtccattcttttaaactcattttttacacatcagtgatcaaataaatctaccaaataagtcattgtagtgagaagaaagattcttaagaggcactcctgctcacagattagcctttggatacacatgtcccttgagaagtcagagaccaaaaccagacccccagtgaggcagaagtcacacttacataaggttctggccatcggggctgtgagacagaagtaggcaggcctggttctcaaggggagttatgtaatctgtgctcatccctgaagagttcacagggaggtgggcaaacactactacctgtcaatgataatttgcttagatgctgccctgagtcccaagaatccgcctctgtcccttcctcataggaacacaaacacacaaggcttcaatacacaagggccactttcaatgtctttggagttcagtcaccactgtttggccacagaaaggtgggtccgttccaatcttccttacaattaccgccctaattattacattatactttcacaatttaatccctttatttgcctcactgccttttaggggctaagtgaacagcacagtgtgaaccctgcagacgaggctagcagggtagccttacagagtgtggcccagctgccagctccaaggccagccaggtgggcaagaccagagtgctaatcgggacagtgacatctctgtctcctgctcaaaatccttgaagctcactctctccagtgtggaggaaaacccagcactctgcaactacgccaagaatcaccccgtgacttgctctgctgagctttgggtaacggccgacatcctaaaagataatcacacccagaacactggtggctgtatgccagtggctgctcagccagtaactattttgttcacatcaaagtaataatctgaaaaaacaaagcaaaacaaaacaaaacaaaaaaccactattagtattttttcctctgacatattatgtctcaacaaagcataccaagaatagacttaaaccttctccactactctaagtagttagtgcccccacaaagcaagagacttgtagaggaagaagtcatctcaacccaagagcttgaggaacaggatttgcaaaagatgttgagaagatgaaactccagccagcacactgccggccgggatcatgctggctctggaaatctttgttggtatacggtactggctttactgtgagagaccatggcttgtatcagcctacagtgcatttgttccttcatcccaaaatgtttatcttcatgccagggcaaaggttatataaatttaacaaagactactaacaatttgaattttacatactctgtaatcctgggattatagaaatattggccagtggattcgaaaacaaacccaagatttgaggtgcttttgcccttaaattttgcactatcagtgaataggatgaagatatacttcatccaaatgcctcaatgaatactctcacatatttcattgttgttactggtggtagttaaaggaattgaacccagggacttgtccatgctaaatccatgctaggtcactaagccacatcttcaagaccttgcatttcatctgtccttaagcattgtaccaactatctatgggtgtttaaaaaaagatccaagagttggtagatttaaaaaaataataaaacatggtcttctgacccagaaaatgggaagatgtgtctgttagtatttaatgaatttacaaatatgctacatgaaaattgatgtgtatttcacttcaaaccacaagagcctgtagaaatatccatgctattaatgtaagagctttgatgtcttgaacagtgtatttttttttttttttttatgtttcactgctaggattgaacctagaatttcagacatggtaactacgagtctggaaacgagtttacactcggtgccatatttgggtgctttcagtgaatcctgtgttctcagacacagagagagagcctgcatttagcatgcacaaggcttgggttccatcccaaggacccaaacccacatgcatgaaagaggctctagaatcaccttctactaaatctactaaatatctcttttataacttaaaaaacagcgtatcacggcccttgaggttctcaataacctaattttattatgttctagaaagggccttcagaggcctggtaggatgtcattggtaaatcagcgtcagtgtgattcagggtagcattctccagcctcagcacttagaggattgcggagttgaatttgtcaaactcgttttagaggctctcattgacttagcctagaaggagtcctagggtttgcattgctaacacattttttggtgatgctgacagttctggcccaggcatcacactctgaggaccactgtcacattaacacagcatagttcactgactatcaccttgactcactttagggatcaccaaggaagttgacaaagtaccccttggccctggccatatccaagacaaattaatacagaacttagggattctggctctgcaagaaatatttaagaacactatttccaggaagttccaaataatcagagaaggttgggaagtatagatatatcaaaagttagactttgtgcatatgactggctgttgaacattcatatattaggatctggagtatggttcagtggcaaagtgtacacaagaaggtccagagttcaatcccaacataaacatactatctatttgtctgactgcctgtctgcctacctgatgggggaagtgcttctgtgtatgtgtttgtcttattgggtgataaataaagtactatttggccaatgaggcagcaagttaggtgggactaggagtcaaggaggattctgggaaatgtagtaaagaagtggtgatccacaggaagtgacatggcagggagactcatatttaagcaagggcaagaaggaagtggccccttctcgcttcctccagagtcaccatgtgatccctggatgggatgctaatggaaggcatcctaaataagataagtcttataaaatatatagatttatgataattaagactgagctaacagatgagaatcctagtcattggccaagcagcatttgtacctaatacaagtctctgtgtattatttggggccttaatgcagcgagcagaactcaagcgggtggtggaaagatttatcataacagaacctacctctgtctgtctgtctgtctgtctgtcagtccgtccatctgtctatctatgtatcatctatcttctatatgttatacctatttttctatctttacctatctaccccctatgtgtgtgtgaactcctgtaagcacacatctatataccatgagtgatcaaaaaagtaaaaactaattttcttccagaacagtgtgtgtatgtgtaggtgtgtgtgtgtgtgtgtgtgtgtgtgtgtgtgcgcacgcgcgcgcgcgcactgcgttctatatttgtaaatgactagtttaaaagagtaggtacaagtttcaatcattctacattttacttagaaaataatcatattatttctaaatccagagatttgcaaatctagagatttgtatatgtcactggcacttgtttagagatacgttttacagttaattgcaatttccttggtataatttttatataaattcattcataaacatgggaaacatatactcagctacaaggaaacgacattgagttcatgataaatatgtctagagtgtcagttctcaaactgagacctttggactaccaggatcagcatccttggtgattttgcagggatgtaaattctcaggcaataccacaggtctaatgaaccagaaattctgtagcaagaacatagtaatccacatgttagtgagactgccaagggattttaatatacaaacatggtacagaaacactggtgtaaatactcaatgcttccttaaatccacgagaaaagcaaggtgatgaatagcactgtgaacctagtgtccaccgctcagttgttttgcagacctaccatgctctctgaaacgccttcattatcattgccacagtgaaacaggaaggagtgtggtgtatacctggagaggattaattgcatagatcatccatgtattggtgtttcctacccaacatagtactgttggtgtgcatggtaggaagtaggagaatcagtgtcagagaaaagaaatagagttgggtgggataggcactcaccttgaatcgtcctcttgaagaaagccttgcaggcttcacatgatgcaaccccatagtggtagccagaggcaatgtcgccgcacactaagcacagtctcttaggcatggagttgagcatgtattcacacttcgtctggggatcctcaacgatggtgctggagcagtcatcatagagtttcctgacaggcccgctacctcccaggataggagcagaggggtagagaggtggcgagtccagtccgttctgatggccattcatggttgaactgtaactcccactggcgtcggaagaaccaccagggctgtggtggttgacgctgtccgtcagggaggctgggctggagggttccgtcttgatgaaggacgaacagctggaatcaatgtgtcgatctttgtttgacattctgcagagaagcctgagaatgaaggagagagagagagagagagagagagagagagagagagagagagagaatgttaaacagtcccaaagatgtagacacagagacacagcagagagtggaggataaaggaagggggaaggaggaggagagcagatgtgggatgtcaaaggcattgctctttaagaatgcttcctaagggctgggactacccatcattcactctccagtcaatacctcttgttctacaagaaggtaatcagcataagggcctgacagggttacatcaaagctcccagataggccataaacaaacgctctaaagggtccagttgcttttattttatctttctcttgaagaaccagtcaatgctacccccggctctccagattctaaatttatcaacagagctgtggtgatttgcaaagtccctgtcgtccctcaaattacatttatctcccctcaatgttccactctacatcctgatgctgtattctttttatcacaaacagaatccaacttttctcttgcagccagcacagatagtcacaggctccataacgatggtttgcagggtaccatctcaccactttcacaaaacttaatgaaagactgacaacactgatcagcaaataatctgtccatgtgtgagcctgtgtgtgtgtgtgtgtgtgtgtgtgtgtgtgtgtgtgtgtgtgtgtgtgtgtgtgtgtgtgtgtactcgtgcgcgcgtgtgagaacacacacacacacatgtatacacatgcctgcatgcctcagggagagggaaagggaaaaagaactgttgaaagatgactctaaaaagttctgcttcaattctacagtacctatgagtcaggcaatctgagacaccctgtgctgtggcatgggtaagtatctcatcattttagaaaaatgagatttacgatggctctctccttgaatcccccttaacatcacaccttattaaaggttctgggatgaagtgcctaacctgacaaactatttctctaacctagaggaaacacatcaccctctctctctgtcggccccataagtgggtagatttctataaaggtaattagatgcaaagatgtaattggttctcttggctttctgcctcgccacagtctaaaacccctcttaggcaagcctctgagaaccccggtagccactctgaagaggtgacagttgagaaagggacttagataattgcttcccagtggaaagttgatttatggggatcccactgtgtgatggtcattctctagaatttgggggagtagtcacagtataacagaatggatgcaattatcactctcactataaatctaatgatattttatcaccgagcaaatatcatgctgtccttcatgtctcaattcccacccccaccacccccttggtttcaattcctcttaaataaagggaggatgctatggaatttcctatcagaaatgtcaacctaactcttccaagtgggaagtctcaagaacaaagcactagggcaggaatttgcctcttcctcatgtagatttcaatgtgggaacttctctgacccctgaggtcaagccacgttaccatgtgctggaagaaggtaaaagccacccaaaggcccacttgctttcccttccccaagaactagggaaagaaaaactatccccctcgccagccctttctttccctcctgcatctgcttgtccccatcactgctaatgagcattgtaattaatagatctctctccttgtccccctgcctgcactctgggctaagcacactcctcaagtcgaggtttgaaagaaagcaagtctgcttgacttacagcagccccaccacttccttttaatttaaaactcttacattgccaattcacttattcccttatacttaccaaactgctcacacatacattatgatcttaggctactggttagaagttattaggctactaaaccatagatgctctctctctccttcccttctctcacaactatgactattaaggctttcactgagccccaccgccctgcagggcacagctttggattgcctgatcacaaaccacaccacaccgcctcttctccaggtgctccttctcagttctctttaaacttcatgattacttaactttgtccctgtatgggttggttttttgttgtgttttttttttcttctctttgacttctaaaatttgtggtctactagtttaaggaacagggctagaaattaacatgccatttttgggacagatatttgctaagtcaccaaatgtgtacatgccaaagacacgttgttcagacctagtcataaaaaatgaggaaacttcagccagttgtctccttcaaaatctcagaccacactttatagtagcctagaagctacctcagggggtactgctgcctaggaaggccatggaacagggacagggtcttctaaatgaaatctggtcactctagtcacaagtgaaagcaaacaagttggatttgcactgtaggttgtatgtgattcttttccaacataagtgtgcccttaattaataacttctactacttcgtagaaatatgaattagattgtcattaatcaaaggcttataggtatgccaggaactgagctggacagaagtctacctcatttatgtgtgacacattcatctctctccgtgtgtgtgtgtgtgtgtgtgtgtgtgtgtgtgtgtgtgtgtgtgtgtgtgtgtgtacatgcctaggagaggcttatcttatctttaagaaattaagcatcagatgtccttaagtacaatgaaggttatgtagccaggaactggaagtaatgaggtttgaattcacatctcgttccaaactttggagcagaaatacctagaagacaacagagctttcagtaatgcttatttccattctacatcataactgagaagctggagagacctacagcagttaagggcatgtggagtgattgcagaagtgtattaatttggttgccagaacccacaacaggtgactcacaactgcctgtatctctggctccaataggttacaggccttcttctgaccccttcagacactacactcttgtgttacaataaatcttccaacaaaagctgcctgagccccaccaccacgtgtgtgctttacgccagccgcccgcccgagttaggcccaaatgaatacacagaaacttgtattaggtttaaagttgcttggccaatgactaggattcctcatctgttgtctcagtcttaactatcataaatctatatattttataagacttatcttatcggacgccttattggcgtccctccttgttgatggctcacatcctgccgctggaggaggcaaacggaaaaaaaggggcccttcctgtttcatcttcgcttaaatatgagtctccttgctatgtcacttcctacctggatcagcacttctctactacatttcccagaatcctctttgactcctagtcccatctacttgctatctcattggccaaacagtattttatttaacaatcaataagataaacatacacagaacattccccatcactcatgtgcacataacctgcccctccatgcacatatattaattatttttagtttaaaattttttttaaatacttagctgggtctgagggcacatgctggtaactccgtcttggtgagattgagtgagataaagtgaaccacaaatttaatacaaacagtgagtttaaggccagcatgtgcaacatagatgcctgtctcaaaacacaacatccaaggcccaaggattcagtgcaacctgaattcaatcccagaatccacattttaaaaaaatagtgctggacattggtggtatgcatttgtactcccaggcctgaggaggcagagaccggtgggttcctgggtctccagcaccctagtctacttgccagaatacagtctagtgagagaattgcctcaaaatttaatacaggtataaatacaggtgcctgcatgtgcacacgcacacgcgcgcgcgcacacacacacacaccatctttcacatacaaatacacaaaatacatacacacacacaaatattgaggatgtagctgagaagtaggttacttgtatgaggccatgagttcaaccccagtacagctaaacacataaataaaagtagctgagccagccagtgtaaagaaggtgtcctcacagaccagcaggggagagagggtacacacagaaaccagcaggggacacagcggacacacagagaccttctgctttggctctcagctaattcctttgctgttcagctgtaaatggaaagggaacagaaggcccccaccctggctgctgatccaccctgttgagtgacgcccaaacagaatcccccaaagaatacagttgtctcctaatcacagctgagctcattacagcgaacacttcctggacgccattacattataacctaaaaaccacagccagtcttaattctccagctctcggtctctgaaattctacagctctattattcaagcctgaaatattcacaactatctataaattcaattgtcagccggtgggttttattctagacttcacttcaatctaaaattagaggcactaaaattcacattaactcgaagagggatgtactgaataagactttatttcaaaagaacacctttttgtcagaaagagccgttttcaagatgatggctttatctgtagccaaagtgaataagcccaattccacattatgctgttaatgcagaaattttaggtcacattggattaataaaaaaaaaaggtctaaatttagttaagaattatgaatagaaataacgtgtcaaaacgtgtaggaaatatttattttaaagcttcaatacagtttacatttattttattattttaggtaaaaagatggggacaaggaagcaggtgaaacagctttcagaatccctgtgaatgaagtagaggggaaccttccaagaagaccattgaggggtcaggagatacagctcagtgacacaggcccagtctagctagcatgcggaaggtcctgggattgattctcagaactgcttattttttaatgacagtgacatttttatgtaaggaacaaactttgaggaatttaatagccttcctgaaatgcaagggctttaaaaataaaacttgcagtaccacttgagacatgctctcaagcaattctgtttatcatgcctcggcataggaatacttctcagccttgactagggggccttcaagttgttattatatattttatatcacttatagttatatacagcatattatagtcatgattatttgcatactaatttgattgtataaatgattctatatattattttgatattcaattttgaagatgaggaaaaccaaactttcttgtgaatgtacttgtttaactatggcatacatttgggcacagagagggagaaagtagaaaaaagaaaaggatcaattaaagtttctgctgtaggggaaacaagaggacaatttatgagttaatattcaattcatattaaaattatcaagctaattgtttttagcaactctccccagatccagataatatgtaggcttgaatgaaggaatgaaggaccgccaagtttgagtctccacacttttatagccacacccagagtagtctacatttcaaagaaaaaaatccaagctttgaagacatttttgtttgttaaatgctgatatacaaaaattcagtaatattacttatttttagccaattctttaaaatatgagtttttctttaaatgttagtcaaattttatatgtctgagtgttttatgtacatgcattgtgggctccgtttgtaggctaagtgctggcagatatcagaagtctgtgtcagatcccctggaactggagttgcagacagtcttagccaccatgcaggtgctgagaactgaactcagggcctctgcagcagtgcacttaactgctgaccataggtccagtccccaacctggagtttttaacttattatatttatgcatgtatgtgttgtgcatgacgcggcatgtgtgtgaggtctgaggatagcttgctagttctacggctcatgttctagagagaaaatttgggttgttaaagtttctactgcaaatacctttaccccgatccatctccctagccccaaatataagttgttaacacatctatatcttatcttgctttgtttgtttgttttaaacagggtcttcataatagagggagacattataggtttaaagagaaatcaggcactagggaaatgtccagagatctacaaggatgacaccagctaacaatctaagcaacagaggagaggctaccttaaatgccctcccctgataatgagattgatgactgacttatatgtcatcctatagccttcatccagcagctggtgaaagtagaagcagacacccacagctaatccttgaactgaactggatgaatccagtcgcagagaaggagtgatgagcaaagggggccataccaggctggtgaaacccacagaaacagctgacctgaacaagggggagctcatgaaccccagactaatagctgggaaaccagcataggactgatccagaccccaggaatgtgggtgtcagtgaggagaccttggaaatctatgggccctcttggagtagatcagtacttattcctagcataggaatggactttgggagcccaccccacacagagggatactccctcagcctagacccacgggggagggcctaggtcctatcccaaaggatatgacaaactctgaagaccccccatggaaggtctcactctccctggggagcaggaatggtatggaataggagttaattgggaggggggcaggggaggaggagagggagagggaactgggattgacatgtaaaacaaccttgtttctaattcaaataaaaatggagaaaaaaagaaaaatagaccataaaaataaataaataaattaattaaaaaaaaaaaaaaaacagggtctcatgagttagcctagactaggctgggactgtgatctattcaggacctcagcattcctaatgttgggatgacaggaaaacagttatatttttaccaaatgaattctgcacaaaacttgagcatatttcctattcctagaaaaagaaaaaagcaaaacaaataaaaaagggttcataatctcacaattcctaaattgacagttaaggctggaaaacaagggttggaagccattctggtctatgcatccaagaggctgtctcaaaagaaaagtgaagttcatatttcttacaggaaactgtgtgtagcagtctctgtaccccgtcttgattatcacactcaggcaaagtctgaaactttccttatatgtattccagtggcaaacaagttcagaagctaaatactggttacttaatgatgtcaccacttcgcttcttcaatatcctgtcatcattaaatccaaaatgtttaaaaaaaacaaaaaacaaaaaaacaaccaaaaaacaaagcatctctctgacgtgtgtgcatgcgaagccagaagccagaaatggggcatgtttacaaatgaatgaccgatttcatgatcagaaggggggggggctgacatggctgtcatggaattgccccctagtcacagtaggactgaacagacagggactggccagttttctacctcctgaactcatcggaggaaataacttaagtacttttgtttaaaagaagaatggaactctcagtagcctatagttatttttcattaatgcttttagaagaagcccctcgtctaaggctgtttcccctccagggacaggctgcagagcgggtgaccccagcttggctcccctggcagcctgagttacaacttcaagcaatactttacaatgcgctcccccacacacactaattgcactctgtaaagtggcaaaatgtgaatcacttagtaaggaaatgggcagcagctgctattgtgagagaatggcgattctgaggaaggagagcagccgaatgaagtgtcatgtcagaatcagctgtgcagcgtgcgatttgagaaaacatgactactttagagagacagggtgtcattatggcttcaccgtaatacagtgctttgacaactgctgtgtctaacataccatcattgcattaaggtacactggcttagttggggaaggatgagaaaggagtttttctttcttaataggaaagatcttcaggtctgcctggttaacctcacaggagatcgccgatggtaaacgaagagtcataaatcctgacccaggtgctcagaaagacaaaaacatcgagtcgacatatatgtgcgctcacaccagcatgagcgcctaattgtataaaaggcagccaatttactagcatacgatcagatcacaatcactggataatgctgcttctttaagagaggtttagtgtgtttagtccagaacactaacttagcccatcccaggagagtgagctagccatgtagcctggggatagggcacagcaccccaggaaaaagtactgggaccctatctgagagggaagctctctcatgtctacaggaggctccccaacattcccaaaatggggagaggagaaactcagagcacaggaagctgggctttcagctcctgtctggatggtgcttcctaggtgaactgtgacttcaaatagagcagcatagcctgtccgttccacggccaccctcactcttcccctgacattgagttagttcattagctctctgggtttaagtcctaaggacccctgcctctcagttatcttccaacattggaagtcccacccagaggactgtgacctttctagctgcaatatctagaacaaaggaagatgggacactgtcccttttcttcttttccaccctaaagggccagaaagatgacaagggaagtgcagcaaggaggccacacagcctcacgagagctggacatgctagaactgtgtagagattgctgtacaaacactgacggccattttcctacaccttggagccgaacaccgccactgatcacgtttttttgtgacccagactgcctatttatttattcagttgttaattttcaagatcaatttttaatttttttttacatgaatgaatgctttgcctgcatgtatatgtgttccacatccatccatgcctggggctcccagaggccagaagagggctggagaatctcctggaactggagtaacagaccgttgtggtcagacatgtgggcattgaaagtgctgttaactgctgaaccatctcttcagccccttaattttatttttcagggcaaggtctcatactgtacatgctgaccttgaatttgctatgtagttgaggctggccttgaacccctgatcctaccgcctctactctttcagtattgggattacaggcctgcaccaccaccaccgccatttcgtgctgagctccaggctgcttttgatgcaggaaacccccattgcttccatactgcccagtgatttatttattatgcatctccagttgataggcataatgaatgagggctggaatggtgccgtgatgtcaccccatctgcgtcatacagcaagcccatcggtggcttccatatttaaggatttgatctgactccgaggtgctgagcagtgtgatttatctttagcttgttttctggacctgtttcaacctggggggtgagcaactcttctttatagcacctagacacagtgagtgggtaaatcaataacactgctaaatgcataatcatgcgaggtaattgtatacacgaagttttgcataatcaactgtccgagactttctttcatataatgggcactcgtgttacatgaagtaagctttaagtctataaatgtactgtttatatgaaccaccattctgcttgaaactccagctaagccgccacctcgactttgaagggagcactctcccccactgccaaatccaaatcaattcttatgatattacttcacaactaacacaatatttaactgatgatggctattaactattatacagaatcacattcaagtactggaacatagcgaggggaaataccatttagttcaagcaaacttctgccacgtagtcaatactattgaggcaaattaagtgttttaacaagtgtatatatttgttcttaatgcagcttaattaactctgtcctctaagctgcccagagacatgatacctgtgcgtctttaagaaactttcaaagtggcaaatcagacactcaatatgcagtacacattggaaaacaatcatgttgtctcaaggaataattcttattttacacaagttagtctcctgggaaccaaaagaccaaggagcagaagggctttcaaatagagtgccctgctgtcaacccatgtgggtataagtgtcccagggtgaattgggtcaccagcccagggtagagcaaaacagccctggacatcgggtggggactatcactaaaactgaaggttctcagagtgcaaaagctacctaagataaatcatccgaatgaagcttatgatgtactgaacctaacatttgctcagtctaagagatttactacgccatgagcagaccccctctgtagccagtcttcaggaaagaaagagccgcctgcttctacaaatctccggtctttcaaacagaaatatggatcaataaagtttgctcatgtttagacaattctgtcttccagcagtcaaggagtacacggcccagaagtcgacacaacaggggactgacagctaaatgaagaccttctcgagcatcttgctggagaagaaacaaacagacactccactcacaggcagtctgtaggctgctcttcacaaatgacaattgaatatagatgctgcacacatacactccaacaatggagttcacaaatcaaacccaggtcaatgaaagctgggctgtgaatgtcccttcggattcttttggctacaatgaaaacaggaaataagaattgtatcaggagcgcctgtaagtggaagtcaccctttgttcattaataaaatattttgcaaaaccagttacaattacccatagagcagctgcctctagggaaacaggctagatactttcgggggtggaggggggctcaaatctactcagaaactggtaaattgtgctagtaagacaatctgaatgctgagtaggaatcatttttaaaataaagttgctttaagcacatagaaaatgtctgtatttggggagacttacaacacaacttgagatggcctatcacatctgctggacggtgcttagattctatttatatatttttaaggtgatagcttagtctgcaagtcaacatctggatataaaaagaagctggtgttgggggctatgtgtgactgcagactaagttagggggtactctgttgggatcaggtgtggtccagctaaagcccaatggagtgtgatggtggtggtgggggtcagctaattattcatttggagactctgcccatgcctaagcacctccttgagctggctgcacacaaaacaaagtacccaagtccacacctccatttaatccaggctatagaggtgactaaagatttcttctacactcaacgagttttgcaaaaaaaggatttattctgcaacagacagggcaggagaagccatcaaagagaaaagggttcagatcagagggacacctgtgctgtttgtcacatccaaaggtccaagtactagcatgcaaagaacaatttctaaagcttatctatcattcaaaatacctgatttttaagagaacaatgtatggcagggttctctgggtctgtgctggactcagtaggaaacagcaggattacctgaggacctggctttgtcacttggactcttagtttcctcatgtaaaatgcacacttccctaaacttcttctggctgaagaatgcatcagagtagacctggagagtaagacctgttataaaagcgcactcagttacactgagaccatgagtgcacgtgcgtgcatgtgtgtgtcacagtgatgagtgtctcagagtagacctggagagtaagacctgacataaaagaaccctcagttaacactgagatcatgagtgcatgtgtgtacctatatgtgtgcatgtgtgtctatgtatgtgtgtgctcatgtgtgcccatgtgtacccatgtatgtttgccatgtgtacctgtgtggaccagtgtggacccatgtgtgtgtgcccatgtgcatgcttgtgtgtgcctgtgtgcgtgtgcatgcatgtgtggacccatggacccatgtgtgcccttgcatacccatgtgtgtgtgactgtatgtgcctgtgtgtgttcccatgtatgccatgcgtacctatatgtgcccatgtgtccccttatgtaaccttctctctctctctctctctctctctctctctctctctctctctctctctctctgtgtgtgtgtgtgtgtgtgtgtgtgtgtgttatgtatgtgtgtgtgcatgtatgctaacaaagaatcattacaaaaacttgctccatctcagtgaagctatagcaaccacattcagggaagagcagtgaccatctgaagtggagtggacagccagattcttggggtgttcctagaaatggctgtcttctttgcccattcccctgtaaggtgggaggtgctggcagaaagggcaattctgtgcaatcagtgtttaagtggttgtttgtcccagtgtgtgacaccatgctgtcagctagcagcagggagccgctgagttgttgctacatttgatttgactgccagtaggaaccttggtttctactgactgctggcagctccctcagccaatcttctcttcatttctgtagattgtttgggcccctcttctgtttccttttctgggataggcagagagcctaaagcagcatggatttgcaagaggcaacctcaggactgttctcctgagtgcatcagaccccagtggtctgtgtagacctgaccacacaatttgtttgctatttccagtcatgtagagaccctgtgcctcaacaccatattttaattgatttctgaggttggcacaggtcagtgcagaagcacgctggctgtcacgtgctctgcacccaagcctatgactgcatgagtttattttgcctgatggaggaggcagcctgtattgcttaatttttttttccagacatgatttctctgtggctttggaggctgtcccgtcctggaactagctcttgtagaccaggctggtcttgaactcacagagatccaccttcctctgcctcccttgtgctgggattaaaggcgtgtgccaccaccacccagataattttttataattattatttttagcctgtattgcttaactttttaataattattaatttttaaaaatattgctacttctaggggttgcttctgccaattttctctctttttttttttctgatttgggaactttactatgtcacaccaacacctttctccttgaaagtagtaatttcagtaaggagacagggacaggacaggtggagggatgttgacccaaaccaagtatacaagaaacaatcagaaggaaacctgtcatctcagtgaactgaaaaacaattatcttttttttttaaagaaactcagagttaattcttcaataatgattttggtcattaggattctcaaggaaattctcccaaagaatgcctctaacaattctaaaaacaaataacacttttagaaaaacattcgtatgaatctaacgggttgtgggagaaagaaaataaatccctcacagacattggggaataccgaattggatggaaaagtgattaacactagagagctaaaactgtaattaagcaaagtttcattaggaagaggtgggtgaggccggtgtctaaggagggagagatgcaggggacaatgagaggaggtaggcttctgcgctgagcaggcaagccatgtctttaaccagatcaaattcttgaaattggctgtcaagacaggattgcagtgatttatacccgtctatcaagtgtgaggaagggagacacagagaacagaggcaagctgctgccacggccgtccgcaaagagcctttaatgtccacaccaccatctgttaccaaatctgatccacagtcccctctaatctggtttacttccataacactaattcttcccaaacctttatgaacacgaaccacaaataaggaaataaataaataaataaatctcctgttgtcggtgagtgagtgagaaattgaatattacagagtaaaggtgttaagcctcaacgacttacaggaagtgcccgttttcccattaaaatgtattcctgagaaaaggatttgttttcccccaatgctgcgatatgaaattgttcatatttgaggtggaaaagaaaatgaggatctaaaagtaggctggggacatgaaagcagaggttgtcataagacacaattgttgtcaagtttagtcactttcagacctggctataaaaatcactttgtcatggtcgtcacatctagaaagcctgaaattgtatttttgttaaggaaatccaagagggtgatgtgtatattcaggaagaaagcagaagggcagaaatcaaaacctgggagaaaggggagtgagaaaatgtccgtcttaaagtaaagagatgtacagggatgcacactcgcccctctctggctgggattctattagcaagggatgtacagggacgcacactcgcccctctctggctgggcttctattagcaagtgcctgggattcgccaaggctccgaccctttgccaggataataaccagcacacaataatgagcctgccgagctataaaattataaagtgctttctgcatcagagaaagattaaactatgctcagtaaagatttagtgttaaatgcattttattgcttcctaagtctgtgaaaatttgttatctctaaaggcaatactgcataaagacccatgggcatgcattacaaaacgagggggaaagtgccctttgcatagtggcctgattccgattgtgcttccagccactgggctcactccctaattctatcagcatcaggagaaacgtaaccttgtgttttagaacaccaactgtgtcacgtggcatatcacccgagtgtcagtgactatcctgcaagaacgcgattttaaaaacctttatattgatccttggtatgattagcactcataaatacatttctgtagggaaggctttaaataaaagctgaccacaatctggtattgccttaagtcctaatactttaaaaatcctagtctattatgtaaaagacacatgctttcagggggaatttttcattttatagatggagtcataaaatgagatataaagatcagaacaataaaatatttttaagctgcaagtaattatgaagataaacatttttagatgctaaaacacaaagtaacttgaaaccagaaaaaatgcttacatacaaaaatcctaccatatatatatatatatatatatatatatatatatatatatattgtttctgtgtatattggtggtggatttaatcactgaaagtatatcactaattatcataaatttaagggattaatgattgtacaaatgattctaaagacaacaactgttaaaagtaaggaatatggtaattttgatagtacatagttttttttttttttttaccatttctattacaagtataaatgaaaaagttttagtttctttacacaaacacatgtgttgaaaactccagacacacatcacaagtgtgtcctcaaatatccactaagaagcataaaattgcataaccaagtgtttgtcattgcactgttcacaagagtctacatcagaaaagacagtcccacgactgagggacaaactgtgttacatgtattcacacatacgcaatttacatatacacacatgcatattctcacatgtgcatagagatgcctactcacactcagacacatatacacctatgcacagatgcacacatacatccatgcttatacatatgcacacacatatacacagacatatggacatacttatgtgcacagacatgtacacacacgtgcactcacatgtgtgcatatgattgcatgcatagtcatatgtatgcaaacctagaggaaggcaagccaacaatacaagaaaggaactatgattacatggcatagttaatctcaaagccacactggcaaaagaagcagccacataagagctgtgctgtccaactctgggtctagagcaatgaggaagctgctgcacattgacggactgtgcatccgagggttgcgggtagacttgctgaagagtatgcataggatactgggggctggctgtgtgtgaaccaagtcatcacacttgtcattgagttatgcaacacctcaaatatttgttttgttgcatgtaaacttctcttcataaagtttatttaaacaaaagtttgaacaatgggttaagtgtaatgacttagaagtgaggaccagaggtttccatcagctcctatgccttggaaaaagcttttctgtccttttttctttctcaaaacaaggtctcagtctgtagcccaggctggcatcaaactcaaaatcctcctgccttagcttcttgagtgctggcattacagatgtccctcatcatgcccgcctacactgttcccgctcttcaatacagacctacacatcaggatgtggtgcactaaggtttaccagtgatgcctgtagcaagagcagagtgcacaccaagagacacatctctatttcttaggtctttttaaaagcataggccctcaatgaataatttgctactaatctaaataatagtttttttttcccctgtaaactgctatgaacttctgtaaaatatttgtcatcaccaacataagatagtcaccagtatcaggtgtacattttggcaacaaagaaaagtcatgtgacttccttccttgcttcattccctagtacctggcccatgagaaaacccttcagtcaaaacatgatatgtgaacgccaatagaagcaggcaaactttaaaagctgcttccgggggccagatgtggtagagcaggaggcagatgcagaggaaactctgagttcaaggtcacctggtccacacagggagctccagggcagccaagactgtatagaaagaccttgtctcaaacaagcagacaccgtctttgaggaccagcacagtagtgcgcacctgacatcctcacacttgggtgatgacagcaggaagatcagcaattcaaggccagcctcacctcagctacacagtaagctttaggcaagtcttagttacatgatgaaattgtgtctcaaacaaaaagctgagttgcttggattttaaaacaaggaagatggaagtggaccacagaataaagccaagcttatgatttgccaagtgggaaatggaaataagaaagacaaggaagagctgcgtctggtgtcacaggcctgtgaccaccacttcaggaggctgagcaggaggaggacaagcacgagtccaacctgggctacagagttcaagggtaggcagcctgtgctacagagtgagttcaagtccagcctgggcaactgagaccttatctaaaaattaaaaagtaaaaactaggcctgggattatagttcattgggagagtggttgctcagttttgtggatgaaagagagctgagaagaaaggaaggaaggaaagaaggaaggaaggaaggaaggaccaaccatatattttaaagggtacttgttcataaaatatgagtagctaaaatgattcaaatgtcaaaattctaagcaggtatccatgaagaccatttgcactgtaacataaattttaaaagaattctttcctcattctgccagatgtgtctcaagtagcgacatctctgtggtcctgtccccgagtaggcatctgtactctgacaaacatggaggccatgtgggtaacattcttgccaggtaggaatgatgaccagagttcaaatccccaatgtccacataaatgccagcagggctggccaaaccgtccagcattaggttgaagtaagagactctgcttcaatgtgtaatcaagaaagaaactccatgtcaacctctggcttccacatacatctatctacatgtgcccacacataccatatgcaacacacacgccccaacccctcctgtttttcacatatagactatggcctatttccacccaccgacttcagtagaacaaccatccattcaatattgtatttctttttaatttcaccctattcctgagttgttgagggaataaataaacacattgaaaaacccataaagccacagagtcaaaacctaaagtgttcttcatataatgtgatgcacagcaagactctcaagtatctacgaactaaaacactaagcacaagaaatagcattttcctgtctccttaggtcccaggaagcctgctaagaggctagcgtattgggtggcactgtactgcatggccaacatttctaattcaaaggtctggtttggaacttaccaacatggttcacggccttacattgctctgccacgtcatctacaagactcagctgccaaagccgtagaatggaacatatatcacacagggaattgtgggaagagtaagcatcctttgcagatacaacattgaattcagtgactctcaaagaggaaggactaaagtaagcactttaggatgggaggctgatctgctggtgggcccagagtgagggaggaggaaccagtgagaacactcaaagggggtttagaaaagaaatgagggccagagtgtcccgtgtctggaatgccgtattacatgaattagatgcctttttcagacactcagagggtacagaggcagcaaagaagagaagagagagaaccaaatttgtgtttgtatcaaacccttcttcagtggtgccacccatccacccccaaccacattgtagacctattatgtgacgggggggaaaaaagcaatgaagtgtgtacgtcccaagtgcgttgtcattctaacaaccaaacctgaagatgacttgaagcaagctgaggtaaaaaccattgaaagaaagggcacaggcactgtggctcagcaggtgagctctggttgagcatgtgtgtgaggcctccagtttgatccagcattgcacacacacagaggggaacattgtgagggggccggtggagtggtgtctaacttctagtaacacacaaaaaaatacaccatagtcagtcaggttaaaattactttggaagttttttttttaattaattttgtttgaatcaaacaaagtatacaatcaaatgcgggggtgatggagctgttccttttggggaccattaatggtgcctgtggtcaaaggcgccttgcataaaattagatgcaaaactagatgcccacagagagctatcaagattcagaaggtatataacatgatgctttgttgagattggtggagcctggaacctctacatgctaagcaagtggcgtgcccatgaactgcatcccaatccacctagagagagtcctggcaggcccagaactctgtgtaaccaggctgcttcacagagactgcctgcctctgcccacaagtgccgggactgacagcatgtgccattgtttctggtcttgtcatttgctttcaattttaagtgtctcagtaagttcccttggctgtccctgaactcactgtagcccaggctggccctgaacgtgtcatcttcctgcctcaacctcttgagtggctgagatgacagacctgtgtgacgagctcagctcagctgcatcacagtagtgtagcacagctattcgagacgaattccttaaaagaaactgtgtggaaagaagtgactgttcctatgagtccttgggagtctgcaactatcgaaaactgtctcaattgatttatttgttagttaacaatttcatctaataattgtaattaaattgcattctacctcacatgtacccccagtaaagttttgctatgctgggcagatgtgagctactgaatgaatctgtcatttgatatacatttttttacattagaaaggcatgaccgtaaggtattatgtcaaggaaaacatcatattccactactgttataactgatcacatggtcatctatgtctaacttgcatctgtttaggacattctcataagtactaaaacattgactgtggacaacaggaagtcgggcaattaaaacacagcatatactgcccccctctgacccctttccaaagactttgataagattgtcagttgagtgtggtgtctcacaactgtaatacctggaatttagaagcatggggaggaggcaggagaattgccaagagttgagtcccagccttggatatacagtgaattcaggacactatggaatacaaaatgaaagccctatctccatcaaataaaaataccaaaacaacaataacaaaagacagcattcttaagaactaacaacataactcctcgtgtcccaagaagaggtctggaaaataggtttctttttcatgtcaaggcagagaaagacacgagaatctgcactggtgaccaatgaccccagtgtgaccatttcgtttccattttctaaatgaggaagtagagctagaaacagggaagatcaccttggattctctaagcttaaactttttacttggggctaccacaggccacaccagaaatatttaatgtcaatattttagtgctaaattattttcataaatgcataggacaaaatattatttttaatattttggaataatcagatcttaaagtgagtgtgttttttgtttgtttgttttgagacaggatacatatatatatattatattatatattattatatataatatatataatatataatatatatgtaatatatatataatatattatatattataatcttcttggctaaatgtgcagaccagacctttgaactcagagatcctcctgttcagtctccacttgcttgagattaatggtgtgcatcaccatgcctacctaatctgagtctacctttgaaatagcaatttgtaaatatctgggaccatcacagtaagtgcctgggcctgtctaatgtgttgtgacttgggaaatgcaagttgagttttactgattattctccagcattagctcactgattgtatgggattcctttcccttctcagaacacaagacgaaggtgctgtgaagaacactgtggcacacgtaaattctgtcacattcacaccttccctactctgtgacaaacatggttctaagcttcaaagggaaagaaaacaaagtctcctccccccaaaaggaaaacatggtatgttttaggaaaagccaaaatagccaccctgagcattactgtgaagtagagctcttctgcgtcaggtcccatgtggataaaaagtgacagagatttgggagaggataagtaacaacttctaaactaatcaattatgttcataagccacagccactggtaaccttacagaaaacacaacagggctgaccctccgttaccagtccaaacagctgatttctgttcttgaggcacattccccgagaatgaaccatgagaaactccgtggttctgccccacaatgcacagtgctaaacatcagagttccctaccttgggggcaatgaagtcacaccccaaaggccatggatccttatgcccatggtccatctgctctgtgacacttaacctgtgcatttgtgtgtgagaattcatccactattgccccatggtttcacatgaggcagatccccaagctttccagcctcgtgaagcacagagacctacaggtaactccgtgttcatcactaagtctcgtggttggctgcaaaacaccaaacaccttgaagtggtggcccaagcacaggtgtaagctgtatatgagaatctagggaggagactaagaaacaaactcaggggatcagagaaataaacgggaaacaaggatatggggcagctttgcccccttagaaacctctctatgagtggttctgtgacctgggaaactgaggcccaggaacaaacccaaactgtcctgtccacacacacacacacatatcctggccccccaccttcaaaactgaacggacagattagcagacacagataatgccttgttcattcacccacctttctatcacacagactcacagaactggggggctggggggcatgtcaaggttacagccaggacagagaagaggtcttcatggcatctaacctgcatctctgtgtcgaatatgtggtcaatttaaaaccaaaccatctattggaaaaaatctgcccaagattttttccagtgatggggaaatgatggtttgggattggctgactgtagtgagtacggggggggggttgttgccttcgtagttttactaaatatgaaagcaaaagatttatgttatgggggataagggcaagaatgcagtaaaaatgagaaaatatggtgaccgtgtgccgtacatcaccggaaggataattatttatctaaaaacttggcgttgttagacttccaacatgcggtatatggaattcatatattcaaaggggggaccataatgagctgccagatggaggtgatggatatgtgtttaaacccaatgaccaaaaccctaagtctgcctgtcacagggagccagggaaaaatggaattctcctttcataactcttgatgccgaaagagggaaaacctggacgaatgatgagtggctcattctaatggacaaatggacactgagctcagggaacacacatgaataaaaagtcatcttccttaaccaatgccactgtcacttgttacactcggagagtgaatggaggtgggggaagactcctgcccgctcggtgtctggaaaacaggcccaactagcagcaaaagtggggaaaccttcatttacaagttcatttacaaattacctctgacttaaaagccagagaaaggactgcttatgtgtatctgtcaactgatacttgtgcggacaagaagagaaggggtaccctgcaccccttgattgatgatagaggcttgcttgtgacttttcccctttgaggtccagagggttccctatgtctcacttacaatgcaccagaaaaggtgtgggacctgtgtacagcatgaaaatccacttagtatcaggcatcatccttatggagagagactcagactccagtgtgtcctgcatcatttgttccttctgttatctgcattcaagggagcttcttgtagcccagattggccttcaactaactagctagtatagcaaaggataaccctgaagactgaccctcctccctccacctcctccgtgcctggatgacacacatgtctggttgatgtggtgaagattgaacctggggattcttgaatgctagactagcaccataccaactaaaccacatttccaatcctctctcctagtatttggtggttccccccccctacacacccctacaaatacaacctgactgaactcccaggatcaaagtctggcaaagttatagtctttaaaaaaaaaaaaagcaagcagagtaaattttaaactaaaagaagattctagctacttcagagtttcaagatccatgtgatggcaattttctttcgcactcagcaagtttacagtagcaagatgttcccctgacaaattaatcacgttctaagcatttcatcggataaataaaatatctccatgggagggtaaaatcagctcaattggttggtaaaatcttccctgcagaaaagtacctgaaacgagtaggggacggcctcacaggttggcttgcacacacatttgtgcatgggaaaaatttcagttgagctgtcatggtgttgaccataacccataaggcactcccagcaccatgtttagacaactgcttacaggagaaatagaaggtaagagggtctcttgaaatactgtaactgcagggcaatctgctagaacctagtctttgtcctccagtttccttagcggaagaagactccagcctggagagatggttcagccacttaaaagcaccggctgttcttccagaagactggagcttgctccgcatcacccacaccgcactcaaaactatctgtaactccagttccaggagatctgaagccctcttctggcctcctactgacattgcatgcacagggtacaaatacaagcaggcaacacacacacatagagtagaggaagactacttttgttttaatagttctctcagtgatgatatccaactcttggcttctcatcaccatattctcaccccagttttctaggcaggtcaggagccggcaagcagttaggcttctgcctctgccttgctttccccactgctaattttggaaagtgaagctggcaattataagtagtgggagactgataaggacgcacacatgcacaagaaataggttcaattcgagctccctgactaatccttattatgactcatttcgcctgcggaatttgtcggttgaggtaagaagctaatttggctttgagaagtgaaatctcagtttgtacttcccctctagtgctactaacaaccccgttattaagagcaaagtggtggggagaggccatggaatatttatggagtgcacagccttgccaagcactttttgtttaacggactttaagcagaggcattaatttctctcgcttttgaacctacagtgagtaccattcaaccttggtcccctaataaagcatattatttttaaaactgatatccaatatgcattcaggctggaccctgagaccaaccataaatggtcaaacaacctgaaagagctcccccagaaatggtagcagtagttttcttgatgttccatccatttgtgtacatatgctgctgttttcatctgcactgctttcctagtggcctcttagcaggattctctcccatcaaatagaagtcaacattaccaatatgttttaagacaataagggaacctggcactgagcctgggctattgagacatccccaagccaaagatgaccatgacacactgtctttattgcttaagtattgccattctatttattgtccttgcttttgggaaaccccacatggtcacctcccctccccacttatacggccataaaattccctgagattcattattacacccctcttcttcccagtgaacaaggtaatgaagttctttatggggagctattaagtaccgcggatgctgtttgcttcttatccatataattaataacactataactgtgtggggaacctgtgcttcaagcggctagctcaccataagtgcagctgatctgactgaactgtcaatggcagatcccatgaggaaccactgcagaagacggtttccttttgaaatctaccctgtgttgcacagagtcttttattagccttcattttctttctttattttagttttcatgatatcaaaaagacttaccaatttactccacaattacaaagtcagcattctgtaaaagtaagtcacaacactaattaataacctgctgggtgtcttcttgagaaatgataatatttttttcttttaaaattcctagcaaatatttgggttcatggctttctctaacagacaacactcatgcttctaaataacatcccccatgaacatcataatcaaataaaaacaaagtccacacccaggttataatcttgactcttactagactcaaaggggaaaactgtaaaatgttagaagggttggtcctggcaggcaaagtgtgctgccagttgttcaggggtgaagttcccattgtcgttccatgaacatgagtacattctagactccccttgttgaaacaaatatgctttgaggtgatcttaagataacaaagtcttatatgtcctagctaccactgagacaagcatacctgatatgacaaaatcatcccctgggatttgtcccaggcccacccaggtcagagaaactcagtatccttttgtcatactattaacaaagctggagtctgggaggctgcattttaaataaaaaggtaaaactttgaaatcagtacaaggaagtcttggtgaatacaaagcaattaaaggaatattcagaaaatcaagagttctcccagaactaatagttcagaaaaaccaatgctgtgtgtgtggggagccttgaactatctgtggtgctccctgaaactgtcttgggagcactgagtcaaccccctccctcacagtcaaggactaccactggtgtggcctcttgtcagttattttctctgcctgctgggacattttctcagcagcgcagcaagaaagtttcccagtaaacgttggtatcagaacagtcagaggcatctcctatgaattctcagtagatggaatgtggagagggacgggatttcttttcacaaaggcagagtgctaaggatgggcacaggaggaagtgtgaggcccaagtggactaggtaagaggtgacttgttgcctgaactagctgtgcattttcagctattgactgaagacagtattttatttagagcccctcaaaggcagacaggaagaggaagttcccagaagattttggaaagagatgattgtaaatcaatcaccataaaatcccttttaaaacaaaggaggtcaccacttacttttataattgactatggaaattatttctgtacctatttggctatagatacaaaaattgcttatgttcaaaaacaataacttggagcttcactggtggggagaagctgacttaagtttacttttcagctgaatagagaatggaagaggacaacactgaggagtctggtctatccccgagcatccagcatctagtgcctttctaactgtgagagggaggggggcaccagcgcgcccattaccttcccacaatctcatcacaggttcatcagcggggggggggggaggaggaataggctgggcaaaacacagaacattctttatctatactatccattcactaatgtaaaaaatgagaagggaaaatagatattagctccaaagaagcataaagtcttccccccctcactggaaaacaattccaccctcggcatgactctgacaccacaatcctagacataccccttacctttcatgtataacttacggccattttgtacaaaccagctcctcctagactctgtgacagtcacaacctcagaaaatgactgtcatgtatacaatgatgcccacgaggcctttcaagcccattttgctcaggctttccttacttcaatattcagcttgaatataagcaattcactggaccctggcttatgatttcattatttcatttttgcattaatcacagtgctaaggaatattgtgtgaacctatttgtttaatctaaacacaaaactcagagttaagcacagatttctgtctgatgacttttatttcccatttaggatctattaatataatctactaattcatatacccaatcagtaaaatgaactgtacctaactaaaatagttttgattgaccacatacataaatcaaattaacataattttttctcacttttcaatctagcagaaaaaattctgaattctatcaattataattaaaaagtcaaacacatgtccccatcccccacgccccaacaaaacccatctgttcctaaaacgacaaacagtagctttaccccttcgaatggatgcctgaaatacaccatacgttatcagttttactgattctgaattctttgagattcactatctttggtgcaaagtgatctgaagttttatctaaacctagataaatctcattggtgtgtaatcttcaccgtgatctccacacccaaatctacatgtaaatggatgttttcaagtattagaacattccagaactacagacaaagggagggggcaggttctcttcctcccttcccttattattcttccccccttccctctatttatttataccagctacttaaataattcacactgcctgcttttcagccccagtgttcctcagaagaggcctacaatgagctcttgcagtcaccagatggactcatgcatgcagcaggtgggccagatggcaaggcgccctgtctgatgcagcctgcctgggcatgggctgccttttccttccaggtacattaccatcatctaaagctgaacgccgtggagttcacgggtggggtgcaagtggggcgtgggcaaattgttcacagcaatacagaagaatcgtaaattaccatcctctctcttccaccaccccaccccaacccagcaagccctgatgttgtatgctgctgctttgttagtggcttttctgtttttgttcttttcattcttagagacctctggggaaggctttggggtacatcctggcagtgtgtgtagagaaggacgtatccttccaaaatattccatctcagctttaagaagtgaagaggattccaggggagtgaaggggaagagtaggggaaattgtggagaaattgcacattttcacaaatatttttgcaacaaaacacaaatgaagaggaaatagacaggaggttcttgggtacaggactacacaaaggtaagctttgtggtggtgcggaaaatattggcgatgcctaaatggacacaatcctttgtttatgtgtctggtgttctttctgaaaaagcctcacctcctttttaaagtctcccatcctacatcacggttccacgtaaaacattctgttacatagcagttgcaaggaaagctggccacactgaccctgagctatcatgagacaggcactcagtagcacggagtataaattttaattgagcataagcacttgacaaaaactctcccgagatgtctctggcacattctgactggcaatggcacagtggtaccatgatttgacccttctgtaaacttctgcgatgccacagtaaatcttaccacctaagttgactaatcatctcactggaaacatctatagatatggaagacaataattttaatgacctgaggcaaagcaagctgcatcttcagaaaaatagataaataaataggcaaaatgcatctgaggagcacacactgcaaagggagaggacagctttgaattcaatcttcaagtccttaagcaaattgaaatccctggcttggggaggtgtaaagggcggctgtgcaggaatgctggatgaagagcctagctgagagtaggtcaatgtaaactgactcccatttgtacaggactgagtacaaaaagtctcactttagaatgtgttatgtgcacccatggccattctgtccttttatcgtttacgtccaggaattctgggactaggactgcacctgtgcacatacagcctttctcaaaacaggaccccaaaccttaacgacttaaaaaaaagtgcaaaggagtaaaaataacctttttttgaggtgacatgaaaagttactatatgctatggattcaatactaaacatttggatataaagaacacatgttgaaaattaattttaaattggtattttctaatccccattccactagctaccattcggttatgagcctccaactagtttgcattcctaacagagtgtttaaaatcataaacagaaaagaaagggtgtttctgagggaaagaaacattaaaagacaaattgtaataagctaccttcttaggcaatatgataacttggaaattaaaatgtaatttttaagtgggggcggtggtgcacatccttaatctcagcactttggaccataggcaagtggacatctgtgagttcaaagcccgccttgcccttcaaagtgagttcacagacactcacggatacgtgacaaaaccctgcctcaaaatttaaaaaaaaaataatgtaactttcagaatttacatagcttctaatgacttggaagttccttgcaaattacatatatactaaggctgctattttcaaactatcaggcaatacaacttctacagtcaaatttaaatagtgaaagaaaattcactatttaatttttaaaaaaataagtaaaaaaaaagaacaaaaggcgaaggaacaagtcactagctctattttaaaatgtggacacagacgataagaaagctggggaacattttggggaacccaagatggactgactgtctgaattttgacctttgacttttgaaaagcattttaaatccgtgcatgtgatattgttgaacagtgtagtcttataaacatcatagcctggggagtcgtgtaatggtagtgcacacacatgcagaaaacttgtgtttgctcatgttaaaggtttatgtgtgttcctgtgtacagtatatgcatgtgtacagacaacagtatttctccaactaatcaccttgctatttccttatttcacatgccttactgaatgtgaccaagtgctaacgttttgaaatactaattagtttcaatccccccaaagaaacagatatgtcaagtttattctaacatacaaaataaactaggtttattatactgtaatgtgtgtgacttttctctgttcaaaacaaaatactgtatacgtcacccaaatggcataaatttcttgcaatgttgctcttcctaactcacatagaaccctacattcacaattgttcttattggcagctttctcattcctaagtagtcacttgtttgtttttaaccattataagaatggggattctatttttccttttatttatttgcaggtttttcactttggaaaaattataagtcaagtaatccacttaaacataaaaataacagaataatcagtcagtagaacttcttagaagccggaaagaccacaccaaatgactatccatcgacttttaatttggaagaaatatctctgtaatattaacctgccaacctgactcaactaatgacttttgctttactttttatcacctccaaaaagtccctaaaaggttttactccctaagcgttgagtgtatggtgtgaaaagagagaaattgagaatgagcacatgttccttgcttgtcttttctgccctaaacagaggcatctacatagtccattgagcactgttggggcaacaaggaacacaggtcccacatggctccgtctcccatttcttcctgcccttctcaaagcaaggcaggggttctgtttttagtacacactgcagttcagtgttaatcctgttttatgttgttcacacctgctgatgactggcaggctgctgatgggctgtggcccatgttgcctgggaggaatccattccatcctgctcacagagaagagggacaagagctactgcccacccaggactggaaagaaagtcgtggaatggatcctacaaaatcagccactgctgcaaatcagggtctggtgtctccagttttctaccactaaaataattaaatcactaggtctttttccacagaaagggtaaactttcttggctatttagttccttgagcttttatgtctttggtaaaactgatataaatatggtgtttgtgtagttgggggtcagagtcactctagtcatatgtgacagacatcttacatcatcactggctgctctgtgtctttaccagtagaatttgtgctttaaaccattattttaaagtagtctgcactgcattcatggaattttatattcaaaatgaatttggaacatatatatgtagacatatatacacacatacatatatatgtgtatttatacatatacacacagacacacacacagacacacagacacacagacacacagacacttcccaccatggctgtgatccctgagctgcatatgtccagtagcaagtgaaatgatttctttttggtagcagcaatagatttaatccatgtcacagacaggggagaacaagagtaaagaaaactcaaagattgacaaggggcccaggcaaaggcagtcagtcattcaaaaaaaaaaaaaaaaaaaaagatccaagagaccctgtctgctctgtgctgtggaacaagttataaatggttgtggacccaaaggcagaaaaactcacccagtcctgacgtgacctcatatgaagatgtcctttgtcttacacaggtccactggtggtctcaaagcccttcatgtccctgcagagcctgctgctgcccataggtgggtgcagagagctcctcctggccagtgcagggcagcctgacaggtgaccaacatccagggggtcaggtggtggccttgggatcactttggaacatctctgcaaacccttttgtcagtgctaaggccaacaaaagcacttgaagcttcagcatcagcttgaggacccccatgccctcagagggtctgctcacttaatggaaaactttttgttctgctctggggaagaaggggtctcagaacactgagggcgaaccatcagaggcactggcagtttcctccatttcctttgaaaccatttgtcccatgcttttgcagggcgtcactttctgcctgatgctctgtgtacgagagggaaatgggcgagagcggcttcaccagagaaaaatttgcacaaattcattctcaggatagtcagccttgttcccacaggacaaatactaaagaaaccctttccactcggaatacaagtcaccgtacatggctactctctctaatgacaccaaagaaacgcatttgctaaaataatgctacaataggcttctcagtgtagaaggcagaaatcatgggtctcccaaattctgctacagccatcagagaataaggactattgtcatttccaatttgactacagaatatgaacagcatagaaataaattcagttattgggctggatcacacaaaactgctgatatttgatcatttttttgacctacaaatagaaacttcatatacttcttcctaatataattagaaccctcattagattatttccatgcaaaatgaaaaatactctaatgtttttacaggtaatttcacaatttgaaagtttgacctttgctttgatttttttttttttgctaatttttcaatgtttgtttttaaaatttcttatcaaaatcatagcacttaccaatgttgaaagttgcagctggacttggaggagtgggatactccagtgatagggtccttgatagcctgtgcttgcttagccctaggtctgacccacggcatcacaaacaaaagaaaacaaaataaaaacaaaagggctgcaacctacctaccggagccttgggtgcacaggccagtgtcaagagctcgtcagcaaccaaccagcttatacaagaactttcactcttagccacataggaccacaaggctacatagcctgtgctcagtgcacaagggctgaagatggtagaaacatcttctccttgagcgacttcactaaaaggaatggaaacatggactcccccaacccccaatgactttgaaagtttgcttgtgacagaaagattccaaggtacccatagtgctggcggcttgcagatcaaacaacacttagcatgctctgtctgtgtagtgttggagatgccatccccttcagacaaggaggggaggaaatccagcagcctcgcttgatcaaggtacctgctgccaccctccagcaccgctccggaggagcatggcggctactgagcagacttaagactaccttattttgattacagtgctttcctcgggcagaaatttttatttcattttgaatcttaaaaccattccatttccagccatgcatttttatgtttacaattgacatcttcataaaagaacggaacctttgagagacagctcagaggcatgaaggttgccggcagtaagtgcttaaatgatttcacacctaaatggagcccagttgtttttagttaaaatttaataatccttaaactgacgacctttctttcacagaaaggccccaagttgcaaaaaacgaactttccagtgaaatatattttaagaaactagtgctgaacaaagggctgtttaaagcctcaacgctttgtcaatttatcagtgtgcgaacactctgtccctcagtcccccgctgctggggggacatatggaacagtggtgcctcacttaatcgaagactattgattcgagtgtgtcacagtgatctcattgagagtaatcaatagtaatccaaaatcaatcactctgatcttgcactaccatttatcaaatctgaatacgccaaattatttgtaggcatcaaattacaaagacgagaaaatggtacaattgggaaagttaatggtttgtattaaaagccaaaccaggatcccctccctacagtaaggaagggtacattaaaatggactatttttttgacaaaaacatttatcttttcattaaagcaccccaaatttataattaatgtcaccccactaattatttttggttttgctttatatgtatatgtatatgtatatgtatatgtatatgtatatgtatatgtatatgtacatatgacctatctggctcaacacagctgataacacactcacgcagtccctgaacttaactgtttgcacatcattttataagtctgataagctaaagtttcaaatgcctgtcactcatcagctaagaaagcaaggagcctcagtcgacacagagcataactgcatcttggaacatagaaatggtgtttaatcgagccagagccagttaggcatgctaatttctccagagaatggacaacagcatccgtgtacctgcttatcaaagagtctgctgtggatgccgtgggttcctttatcaacacattcccttgtaatttagtcaaggtaataaatccttctattcattagctcacactcaaaagcacccctccttatttaacttgaatgggaagaaagggggcacagagtgtctaaaacatttacttttgctaatgtaaaagtgctggcattttacttcattccgataagctggtgccactgaaagagattattcttttcttattcaaacctatcagcattttgtaaaaagctctcccaatcttatctggagtgcgagccagcgtggttactgaaaacagtctgccctgctcttctctccctctgccatgctatctgataagcccccagctaacgaactgtatttacacacaatcaaatacaagttgtatcttccacacgctggagccagattccactttgccattggtttttctgctgtgacattaacttaacaaaaatgtcagcagccagtatcccaaactgacaaccatcagaaaacactataaaagcactcaagtagaatattcgggaaacaaaacaaaaagaaaaaacaacaacaaaaaaaaaaaacaaaacaaatgggaggtgttggaggcaatctccttggaattcacagagaaaataaagggcacagaacaagtaggcagggtgactctggtaccctttcaccaagcagcatggtcctttagcaaaacaaatggaaagaaacagatttttttttttaaataggtgtatgtcttaggaatggagagggaaatgttcagaaaacactagacctaccaggcacatcccctccctccactggaggcagagaagttctacaaggcaagcaaaagaagacaatagacatcaaagaaactagaaactgaagatgagagaaagtaatgctgtcatgtttggtaaccacatctcaggacagattttctaatcattaaaagcctcataaatgctctagacattaaagttttgttcaatacaaggaaataagaaaaaaaataaatacaatttgagtgggactttctaccccacattattattttttttatttcttcagacttaaccaactggatgtgttcactataaatggtatgaaaaaaaagagacatgtcatccaggagcttaattcttcactttcatcttggaaaggcctcccaccaggtcatggtccaaagaaattgagagcaggccttggttttcaggtagtactttggaggcatgagaaacgacagtgacatttctagaacacgagagaattctgaaatgttctggaacaacggggttacaagacatccttgtacataggaaagaatgcaggagcttgtgtctataaaatgcccatgtgtgcctcactttccttggccaaggtgctaagagggagcagagaggtcagccacatgcatccatctgaggtcaaatcttgatgctgtctaaactccaataggaagaatctcctagcatgcaacccagtacccttcagctgatggtggcttcccggtctgggaccctatgctcctataactgatgaggcaggtctcagtcaagtctacagatagaaagatgctctgtcatttcatggggtctagcacccactgtgtaccgtcacctcctcctagaggaaaggcatgactcccattctctttccctgatcatgagctgttgattgcagatacaacagtccttctctaactattgcatctgttttgacaaacgagcagctgccaggaaagcttctttacaatatgcttgcatttggggtaaaaatgaatgccatttagcatagtcatctttgggtttgggggagagctaatgtattacaagaatgtggaattaaggaaggcaaagggcatttggagaagcgctcacaactgaacaattctcctgaaaaagcaggagaacctctgctattttttcctatgatattttttttctaagtttgtatataagctttttcatgtttcccaagctaaggaaattctcgtgactcttgtgtatgatcaacttggaaggcatacctgggaaaacattttaactagtcgtgagtatcaagaggaaagggaacatagattgactgagcaagccttttcttaaattctcgaaagccactgaacaaatgggcaaaatgtttgtggagtaaataataaaagagaattatcatttgccaagatctcattctgaccccaggggtcaggggtagaattcagcaagcttttgcttattgtctgtgcataaattcttgacttagttttaaatgtttctctgcacattgactaagccatacaagaagcgagaacaggaggtttttaatttactttttgagaaaacgtaggcaaaagctccacaaaaagagatgctattcggagtagccttcccaggagcctgaggattttccataattttgatttttttgttatttgtttcacaaatacaagtaatgaaggtttaccacctccaagatgctccccatctcacaggctgctggaaagatttgaatgaactacacattaccatccatgtagtctataatccctatggttagtcttaaacaagaggccaggaggcagcctggctctcatcaccttcaccttacccatcctatctctgatataagtgagaatttattgctttctttccttatatttaggaccatcctagccaactgtttgtggggaaggtggatgatgaagcgaagttaaattgacacgcctgtgatgtgcctggcagccctcagcgtacccaatattaatttgttttctttggctaggtacgcgctgccagtgtgtattacacgtgagatctcttcagtcctggtgacggaaattctgcatgcggtttggttgcactggaggccacaggaaaaagcacattcatgatgataatagcttcatacaattaaaatataaattcatgtttaggttcttgcgttagcacacaacctaatctcacacaaagtcctgataatcatttacactttaatatgtggtagatttttaaacatcaaagacagtgttttgttcagtactctaacagcattgtatggtacaatctatagttaagtgcacatatagatctttgctagtgtagtgaaatagattcaaagagccagtgaaaaaaacccaatttctaaataactgtacctttcttttgttgctttgacttaacaagttgccttccaaatacagaggccttgccacaaattgtggtgcatactatttgaagaaattaaaatatataatgccagctccctccaaacactcaaaaatatcattcagaaatcaaaaggagaaatatgtgcaatacacccatatgtgatggtcaaaaatctagatcctttcaatagtttacgaaaactggcaaaatactaaaaataaacaaataaataaaaatactgttcaaaatgtcagagaaaaagaaacaactgccaccgtgggaagaatctgccgggaacaagtccgactggaaattgtttcattagctgaggcttcctaaaatcttcgaaagggaaagtctaatgtggacttggaggagaagaaaccatcaggtaggcccttcaaagagcagagggctgtcactcagcacctcagagagtgatggctgaccctgatctgatgtctcggagtaaaggagcggctagcaggaattttccataaacacaagcgcaagaatttgataaagcgttatgcaaataaataaaggtaggaaatgagcccagaacttttaaggcatgtatgaatttgaaaaagaattagacgattagaaaaagcaattgcatgaatgttttctatcaacacacacacacagatttatgaaagtaaaaacaaaaaaaaaaatcacagaattctaaatttaccttggagagtaaaactgaattaaataaaacccagggtttattttacagatatagagcacctattaattttatccatttttcctcttagaaaaaaattaaggaaatgacatgtttactgagtgcaatgataaaaattcgcattttcacatttgtttgagagctgccctgctctttagtaacatccatttgtcaggccaattgtataggaaaagatatagccaggagctatttcaaaatattctactggatatggcctcaacccattaaattatgcatttaccatcagcagttgatttcctattttacaaattatttatggttactagatgctgaatgtataagtgagtataatttttaaaaattaaaatcagacaaaaaatgtgcattttaggttacctgttcacctgtccaatgtataatagccaaatcaattctttttccaattgagcctgataaatacctaaaacatgaattcagggttaaaaccatgcctggcaaatttaattgaccactaactgtttatgcattacacctaagacttactttattaggcaaaagcctgtgaataatattaacatatctaaactgtctatatacccctctccccacatgtatgtgcatttcacacgcagttaaacatacagacacatcccccctatgcatcctagcggctacttgtaattttaaaggaccacatgtgcatttatttatcagacatggtatcaataatctatatccatgagatgtggccacaggagaaaagaataatcaatgacaaaacatgcaaaatgcagcaagaatggcaagccggagagagacgcctggtgtcatccctgcactatcaaacgcacaggaatatgactggggagaggtgaaatatttcactgtcagggagcagagaaaagcgcaattcatttctatctcatgtgttttaggacaatgacaatttaatacaataccagtgggtgtataagagataaaaactgaacaaactggcccaacataatcaaagattttctccagagagctggcttggccggagctcgcctgcactgtaacacatcaacctggtattgtttctctcttctgtgaatttgcttaaggaccgactcagagcacagcgtctctgctgcaatgacctgaaagttctcctgtgatcctgagtacactctcatcttctttctaaatgcttgcagggaaaatctaaaaagtttatttgctattaattggtttcataagaatcactgctgtgaatggccacttgtgtgtaaagcatcggccagagactatacattttacccccgtctaaggaaccatacaaagatgctgaacattgctggacctgcaaaacaaaggtctagtctgtttagtcactaaaagccatgttgaggaatttttcacaagtcagacagacttgcaatttggatattgtgctacctccccaagaatccaccccttctttgtctgtacttctggcaggaggaaggtatcgttaatgtcttgttaaacagaaccctggagaagttagctgccctctttgatgaatagcaccaggtatggaaaattaattgcaaaagtatggcccagctaatgagacggcccttatcttttttctcaaccaaggaagcacaagtattttttttttctgctggctcaatactttaaaaaaaatgcctaaagtgttattaactaaataaaaatctgatcaaaaaacctcaatcaaagccacgactgatcacatattctaaggtctgggctatttgaagtgaaaagtgatttcctatgttattttcctcctaagatttaaatttccctcttttgctctctctcaacttcagggaaaacacacacacacacacacacacacacacacacacacacacacacacacacacacaaatcctttccccttgctagcattttaaaagctgaatttcaataccatgtttcaagaaacagccactatgcactacaggtcagattaaattaaggaaatatatcaaacactataaacacagagtatatattttaaaaaaaagcaaaaccttattggtgggaaatgcaggaaaaatgatcatccatgcaagagaattaatggctatccacaagggctttgctaataacatgggttaattaccactgcggcacactaggttcagtaaataaagcttcagagccacaagcacattaagataagaggccatcactgtaggaaggaacaagcctccaccatcgcccttgcctcgctaagatgggaagctgtttaaactcactaccaaatgtgcaccgggtaatacccacatacatactctaacacaaagggctcgtagaacataggtgcccgtcaccactcccattcaacatatattacattaactcaggaactctttaaaagaaaattcctttttgcttacttcaaaagaaaaaaaaataaatcatgagttacataatacaaatcacttggggacacacacatttataaatacatatacatatccacaccatacacatacatagtttaggacatgcaccatacttatttaattcttagaaacccaggaagattctgttcagttttgtgttgggcaaggttaaggatctacagccaaagaatgctaattgctgttggttgtcttttccagaaaattaccgagatcgtctgaggaccccacctacaccacctacctttaaggtttcaactgtttgcaacatatttatacagaaagtagtgagttctgagttatagagtttgggtattctacctcagaaaaataaacttaaaatgcctcttgatggctctcaaattatgtcgtatctaaaggaacttaggcaggctccttaatttttttcccctttaaaaaaatagtacccatagtatctattacgatttatgcttctgttgcttctatgattctacacaggtttctttcttatttttattctttgcatttccctatgatagtatcactttggaagaagtctatttcaattcaggttagcttttcctgagaagacatgagtccgagaggaaaataaaaatcaacaccctgaaacacaggaaaccatacacaataaaatttgcatagctctgagcagggatccttacaaacatgaaactgctaaatgttcagtgtctggatttcaagaatcaagctggaatttcctaaactgctgcctccccttcttgtctgttttggagtgtttcaattgccttctcccaacagctgtgacaactgttaaaacagtcagtaaaattaagtccgctctataatcctgtagtcaatgttacattttaatcagaggttgaaagggattcgtgtgacgagcgcactcatttagaatgattacacagacacatatgtcaaaaccagcagatacattatttccgtctatttatgctatcagctattactgctattcagtaggaaacaagccttacagcattgtgttcttgaaagtgctggcgcctttcctaaaataaaaaaaaaatgtatgtacttacatagttaaaggttaacattttaagatctcttaatggtggtcaataaattgcatgaatctttttaacagcctcccaagaagaaatggtccaatattttccttggaaactgcataactcaggtttcatttcagtgtatacacacgtgatggggttgaaaccggcacaattactatgaatattaatagcatgtataaattctgtggtttattaattgagacagaaaggcagatgcgttgctcagccctggatctttcagtctgtccagtgaaccacgtaaacatcacaactgcacccacacaataaatctgtattttttaaagatgacttttaattgaaccaaaaagaaaggaaggaaagaaggaagaaagaaagacagacagacagaaagatagaaagagctagtttgaatcttgtgccaaagccaaaaggaaatgtgccctggttccatttaaacacgtctgctctaagaagcctattttaactaattattcaaactagctataagaagttagattcaaggatactactttttccatgaaccctttggagggatatttaaagtttgctctgattatttatttaggaaacaaagttcagaatttgggtgagcttaaggcattctcactgacattaccattctcccagtctacagcccaggtgcaccgaccttctcactgtacttgtgtgggcagtcttacctttgtttgtatttcatttttattcttgagcattgtaaggttggctcttccctcgagtgtttcaaacagatgcagagacagcctctcaatgtttcagatcccagtctcagctaatagttcctgtgagagtgtgtgcgtgtgtgcatgtgtgtgcactcacacacgctcaaacacacacaggcaacgagagactgctagccacttttcatctctcaattatgatgcaaaggaaaggacagtccactaaggacagttagtggacttctaccaccaacacacagcccaggagcccagagttctgttatttccttcacaacctatcaagagaaaggtttgccaagagcactcttttaaaaattataacagtttactgtaatgcgaaagccatctaactgactcaacagaaagcaaaagagaccactgacagcttcgtgatcgagggatattctagctaaacagtgagttgaagttaagtttatgacctattcatttacacgggaatacccagtttgctttccctactccaactcactccccatggacctttaataatctaaacatatagactatccaggaaggtattcataaataggattgaactgcatttaaagaagtatactgctctttttatatgtttctggacacaatatgatacataatccaaacccaggacatgcacactgcctatttaagggaagattttttttttaagtcactaatgtttcttcttcagttctctcccctttaaatatttataatgtgtgacaatctcatgttacttaacggactgatttgccagttaagtactgacttaatgctaaccacataaataccattaccctagctctgagcggcactgggctagttgctaaatcgttctctgcaggagaattaataaatgtacaattttgcctctaactcctcgcagtaaagggtgacagggagtttcaagtatctgtcaaactgcaaatacataagcagcactcagtagtataaatcattctgaatattgtattttaaaacatctttcctaaggaaaatgggtctgggtaaaagatgcattttaacagttcactgagcattggtgcccagagcctattcttagcacctgaaagagaagtgactgtcacccagctgttttagtgacagtcacagggctgcctcaaaggtaacaccgtagtcagagaacaattctccacttactgatttaggagatcaccctccacacaaaaggcaccagacagacaccaacaagcacccacgcacgccaaacacccaggccactacgtgggtccgcgtgcacacacgccgccctgtccacgctcccgcacacacgcacccccacccgcccccccccccacgccgagttgcaaaaagaaagaaaaaaaaaggtacctactcttcttcgtagtgcagggaaaaagattcaggcaggcaaagttctaccgaatccatgtgcgcccggcaaccattatttgtgcaccccacctataaatcaaagtttccttgacacagcccggtgcaattaacacgcgcgttctcccggtgacaagcccataggcacggccagttgggaccgaggctcgcacactctctcctaatcaaggacttaaagccccgattggagcttattaatatgaagtagggctttacatatgcagtcccaccggcccaggagcgcatctgattggggggccgctgcccaatcaggagggaggcgacgcgaggcctccggagccgcagcccgcaggtaggcagggcgcacgcccggagcacggtgggcaaagctgcagccgggctgcaaaagccccatgcgagccgcagctttcccgtatttattcttttaattcctaccctcccacacgcccgagaagcttaaaaaaaaaaaaaaaaaaagtaagggaaaagaaagaaaggggaaaaaatacctaccataactaacttaactcactctacaccggagcgaattgctgttggtttttctaacctcagatctattttgtttttgcaaagaagaactcatgccaattcgataaatttggccgacggattctgcgagaggtgctgcagaagtttatcctgcctcactgtgtgtatcgagtgctcagccggggcagcttctttttatttctttttattattacgattggtgtgtgcgctctactttctcattagcttctactgatacctttctttgctgtgtcctaatataaagagcatttaaaaaataaaataagagattcttcgacatgatttcagcctaagaactgactggtggagccctctggggtggaaggtagtagcttcatagctgtacagaagagggaagagtgcatggatgcagttggagaggggtaaacattttctattctctctctctctctctttctctctgtctctgtctctctctctctctctctctctctctctctctctctctctctctctctctctctctctctctctctctctctccagtccgcacagccttttaaagcaaaggtaaataaaagataaataaatgcatggtgtattgtcccttctctctctaggtttggagaggaagactaggggctggggctggggcagccaacaccttaattaaatatcagtatattttgatcaaatggacatacagttgttgtgggaagaccatgaagcaaggcactgaaactatcctgaagtgtatacttatttcaatataggcttccgaaccagggaacatactcatacataaatgatttcaccctgaacatttagcactgaggtgaagaacagattatcggcttttctattcacaacacccctggcttgttttaaataatcaactcagaaatattttgcatctcaccccacagcctggcctacaggaagcagtgtgagaccgataataatatacaaaaattatgggggcttggtcaaaagtgtaaaaatgatgtaagaaggaacagtgtttttcctcttacaatagtgtataggctgtttttaattctcagacaataaagagtatatttgggttctattttaaactataggatttttttgtgctaccaaatgtacatttgaaacagataccagctatttatggaagagagttatctgctaccttatggggagttgaaagacccagggttttgacggaattcagctctcctgtgtctgaagtctttcgggatagaaatagtataatctctgagatcaaaataaaacagttcagatattcagtgtgtgttaaattcaccacatcagaactcaactctttcaaccctctcagattttctaggtccttaagaaacaaaacactaaaatagaacagccacattaaaattcagaatgtaaaaatgacaggcacgattttgtcgtgtctgccctccccccatgtatttagctatattgaagataggcatccgattgcttctgagtgtgctttatatgtacacaagtttctagaaacagaactcacgcagcaaaaaaaaaaaaagaccatgcttaagaatactgtataaaaacaggtagtaaaagcttaattaccagtagcattatgctgtctatattgttaaatgtgaactctgcaattaagatgtaaatgtggctgtgaacagtgaattaaaagagctctgagatggagaagaaaatcctagcactctgcagacacccagtttaaaaaataaaataaaataaaaaagccttgtctcctcagttgaaaatgagatatgtaatcagtttacaattaaagaaataaataaaaaggcaccttgcaggaaatgcaatttttttctaaaatgcaatcagagaaatgcaaaggcttgtactgctttgttaaagaaaagcatattgccctctcattaacctgatattttttactaaattaaaattttcaaaaaagttagaagatctatataccaattaaacacacacacacacacacacacacacatacatatacacacacatttcaacaaaagtttcatatttttgtcccaaaatagttatttaaatttaaaaattatcttgtatacttgatgcatcttaaaagcccccaaagaatgtataccaggacacttattcagtgtcctgtaaggcattctgtctcattgtcttaccctgttgtgacaaaacctgactgtgtcctttgaaatggccctttaaagacaaggtttgctgtcagttttttgctaatggatcttaaagtcaccacatggcttagaatcgatctttgatttccccaaattttcctatttggagaatttatttgctttcatgacttttctgctgtgtactttgaaaacatagacacacgcctgcattagtctgctctctgtgcccacagagaaacatgtacagaagtgcacagtattgttttatggtcttacccaaactcattttcacaatgaacaaccaatgtgtgctccatgagtccggctggagatccccggaccatgaccctaaaaacaccacttgcaaccttgaatgcagtgcagccaatttaaaataatacccaattacactaaacttgcaaaaagcttgcagaaaaccacacagacacacagctggaagcatccaagagctcctccccagccacagagctgcctcaccttgtgaggcaggaacagaaaatcattagtaataaacatgccacctgcaaaactgaatgaagcatccaaggatctcagagaaagtagagaaaaatcattggatggtggcagaggacacaagcctaaacacatgctgttgatctgtgtatatactacatagtcttaccgaaatgtgtccacccaaatcaggaaaaattgaatcaaacaaaaggacccctgaagactgtagaacaaggaatataaataaattagtcactgtcagtgtcattttatcaggcctagattctacacaggttccaaatctcttcttcattagacaatgcagtcacaaatatccaagcatccaatgcagaggcaccaagaagatgatagatttcatttctacttgaataaaaaagaaacaagcaacactaagtggagacaaaagatagattcctgtgaattttatatggcagacatttttactacatttccatcaaaaccatgtcctaaaacatcctgacacttcatcttaggttgggcaaagatgatgaggaatttttgtcttggtgtcattattgtgtttctactgattttagttttcaacttcctccctgaaagccaataggatgaatctactggattgtttaaaatcagctttggcgtggttgaaggtttttatttgacactgcacttctgtcatctgttacacatttgaaagccaatggcctaatatattggtgtttccagtttgccttgtaatctgccattgtggatttctccctcaggtccttaaacgtttgaaaagtggcttagcttttagaaccacttcctctgctgtcttagacatatcatacatggtgcaatgaatcacagcacaaaaacggggccaagactatcagaaaccactgtccttaagtccccaaggaaaacaatgacggtcatccttcagaaaaaaacaagtaccaatcatggaaacccagatgtcagacccccttcacattccccggaagccctgtggccttgtataggtcccctcatctatctgtcccctgttccattatttgcagaacccagtttctattgtgctaggagcctgcttaagcttgcacctttcctatagagaacacagacttccatccaagtcagggatcctaccttctattaccattaggcctctatcaattcaccatatcacattatctgttgcctttcatttctagggcgcagactttgatatttaaattattgtctccattggcaagaagcaatcatgtctgctgaaagtggttgcttcaacagaagcacgcgcgcgcgcgcgcgtgcacacacacacacacacacacacacacacacacacacacacacacacggcatcttgtcccataaatctaatccattcccaaattatggagtctacattctccaaggagcccttttctcacttccagaccacaccaaactcttctcctagtctttttgtgaaagagagaaggaaaaaaaaaagccaggaagagacagagaaactactagaggcaatttggtttctgtttaattaattcaggattattttgcttgcattttgtcaggctaataatatacacagggaagtgtcagtaaaaattaaattataaactacaggcagtccagtgggaaaactgactttggttatattgtatttccaaggccctcactctgatagatatcagatgcgtgttagggactgctgcaagcttttacaagctgcatggcatgcattgatggagacatagttaacattgtgaaattatacattaacaaatgagctgccgttacattctttcctgaatgttaagcaccatgagctaaacgcagaaaacattcaaggtcaatgtcccgtttttagaccttttcaggcagctgtaatattatgataatcaagcttaaaatattcctatagaaagggtaaattagccttttcacttgaaagatgattatgataaacaataaacccaagaggggacaaaaatccctatttttaaaagctataaattgttgactcaatgatgtgtgtgatagtgttgtccaaaataaagggtagtttcattctgaaaggaggggggtctaggaaacgatggaggagggggttggagcaaatatgacagacttctgaataagcaatacacggtttgatgccagcaaaatgatcaaattacccaccttagccagcccattaaacataaagtacatttgaggctgtgtgtgtgtgtgtgtgtgtgtgtgtgtgtgtgtgtgtgtccatgaaacatttaaaaaagcacattttccctcatgattatcaatacaatctgaaaggtttctactctgagagtttccattaaccctttttttggtccagattttcaaaggactagtttaaaaaacagaaaagagtgaatcaattctgccatcagacagccacatgaactgggcagcaagagctcattaaacttattttttttaagtcagaacctgacaaacttctaaggatctgtttcacaaatgaatatgcttgataaaaatctgcttgtctccaccaaacctgattaattgggagtgtgcctgtcatacttgcagaagccaagagactttcaaataaaagtcctcagagaaaggtgccttagtttgctctgagacaggtcaagggttcagattccaatgaagacccagagagactttggactagagtacctttacccagggaactccctcctccctccctccctccctccctccctcctccctccctccctccctccctccctctttctttctttctttctttctttctttctttccttccttccttccttccttcctaagaaagaattgagaattgagaaattcatcttgcagaacggttacaattcaacaagttagactaatccacacagtgcctggccctagttatggggtaggaggccatgtgacctatcgggttaaggtcgttctcttttgggcctagacctaggaatgccagtcacccctgtttatattcttaaaaacactcgagtttagataataaatcttattgtcattctctacaaagtgagctatcaaaattagcgttatttttgaaatctaactggaagaatcaacaccagagagtggcactgtgagtcagctggactctacctttgaatcattcaaggtcttagaaacagaagaaaaggaagtacaagtgtgacagtgttaattgtcaacatgacagaatctagaatcacctgggagtcaggcctcggggcatgactgtgggacattatcttgattgcctttatggagatgagaggagccaagaactctgggtggccacactctctggctgggaccctggatgcactcatggagaagatgctgggcagctccatgtgtgcatcactcacttcttcccagtgctggatgtggctggggtaaactctctctctcccttaatttgcttttgctaaggtattttttttttatcacagcaataagaaaatatgtttcaggagaagaagaaaagaaaaccatgcatcccctctagtgaaatgaaagaacttttgctgtaagattctgtgaactgcctgttattctaccatgggtgcaactcggaaatgcaatgagcaggagtaaggcaagccattgccctcagagtggtcatcttgtctgatgaggaagacagtgccgggagggttagaagattcagctggctcaccaaataattcagctgcacaatgtttcccaaaaggaggcgaggagcaccctctgatactttcacgtctttctacgaagcagtgctggcagtcagcagcgaaaccagtcttgatcatcccaggcaagtgtaattcacctaagtctgctgatcagataaatcaagaactctgtttctttataaaactttattctcccatgttgaatggctacccacacagggcagagcagtgagcatggacaacggggaattatcgacagggccagcctaggttaggagttcaagtcttttaccttacaggtacttggctctggatagctaagagccttaacatgagtcgcactcctaggaggtgaggcagtccctaatagcactttacatctctcccgtttcctggggttggttaacagcaagctactagtgttagtctcacaattgttgacaatataccagtgcacggaaatagggcacactgagatctgggtgttcggaggacaaaagtcctccaaagagtgaggacgcaatcagacccaagaggcaaatatcacaggtatacttggcccctatagcataacagggtctctaaaatcacatattttgtttctttctaagatatatcttttttattaagtgtgtgtgtgtgtgtgtgtgtgtgtgtgtgtgtgtgtgtgtgtgtctgagtgcatacaagtgcagtgcccacagaggccagcagagagcatcagatgctctgaagctgaatttatcagccatctgggagcttcccagtccttgcccagagctgtgtgcacactaagctactaagccatttatccagcctcttaaagtcacctttttttttttttttaagaagagggaagcagtgggttgttagaaattaattctctttcccccagctaacataagtggatttggggtggccgtttcctttagagtttagttttcccaaaatgctgattctaccctgttagccctctaactgcaagttgtggaaccaagatggggttggtagcatctccaaatcagtaatggaacctggtgaacagtcttgtcatgtctcatgtttcagaaacatgaagaatgaatgcatccagaataaacaaaggagtaaatgaatggatgaacaaataaacccacaatgactgttactcctctgttaattgtgattcagtaagggggctttgatgactggtgtaataaaaatgaaatttgaaaactgaagccattctttttttaagaaggtaaatagagaagagaaaggaggttgggataaaaagaccaaagagaagaaagaatgtaaaccaagccccggggatccaggacagtgctttagctgccatcttgggatgggttactggatagtctgggaggagctgggacgggggtgttgctttctttgtctttgtatttttctgttttccaaatattcatactgactaacttttgggtaatgaaaagcagataatactgtggctccattgctaaccctccttatgacctcagcaggtgacccggaagcactctagcctgtaccagcaggcgaatgctttccaacccataagctcagacaagtgctgtggccaaatcatattatgtcaaagccttcagagtggtccttctgggccccagggatgcacctggctccacctccccagttctggggttacatgcatatgccaccatgcctggctctttcacttgggattgggggatcagatctaggtccttatgcttaacaattaaattgcaagcagctgaccagatggccttactcttcagctccagatcctgctgtgtaatttggtggcttcatccctagaggaggaccctatgagaacacagtgtatttgtaagagccattgtttttttttttttttttttttcccctaggaaaccagactaagggctggcaagatgtctccactggtaaaggatcttgccacaaagcatggccactcacctgagcttgatccctagggcccacatgctaaaatgtgggtgccagctcccacatgttgtcctctggcccccacaggcgtgccacggcattcatgtacccacatacaaaattaaataattaaaacgtcaaaagaagagaaacaaacttgtgatataaagtaaagcaagacaaataattcctcctctcctattcctctagtaggtaaaacaacaacacttggaccctgacgatggcaactctcctcctgtttgcgtctcacacacctcaggtgtttgcaaacctgaggtccacaaagtccaagtgtgtgttagagagtgatacaattaaagaacctggtttattttttctttcattcttcttcttccagactttagttaccactgaattaggaagctaaataaatcaaaggcaattttcattagagagaaaagaagcttaattcaccctttgataaattagaactctaaacaaagtagtgaaaattagcaaagagccagcgagaaggctcagcgtgtacaggtgcatgccatcaggcctaaaggcttgactcgaaccctggaacagcttagctgttgacaatttaaaataactatcaggtagactacttcccacttgggcttcttcttcctctcgtacgacctgtcagaaggccattattctattatcaccatcatcaccatctttattacacagatggcaaaactgaagtccaggaacgttcactattccaatacatccagccactgcattgcaatgtcacaatcggattcatgtattaaaatttgaattttacattgttagtactttagagctcaagctctttcttttacatcttaaaaggcctcacaaggaacacaggaaagccagcactgggctcctgtagcaaactgtccaccaccaggaagctttgcttggggaagcagcatggcgcagtggtcacttgctaccattctctgagccaagtgtccttccttcttgacaggcatgaccttttcagtgctccgtggcaaattcctgcataaatgcctgagacaccagcaagagctcagaacacagatgaagcccccaggtctgcatttctcttctctgttggggacttcacttgataccatactgtcctcatggctgccctgatgctcccagtgaagtctgatgtgggaggcccttccgtatgctgtgaataagtgttgcttttattggttgatgagcaaagctgttttggccaatggccaggcagaatagagctaagtgggaaatccaaacagttacagagagaaagaagggcagagtcaggcagatgccatgtagtcaacaggggagtaagacatgaggtaacaagtcaagagtcatcgtggtaaaacatagaatattaggaatgggttaatttatatgtagacctcgctagtagaaagcccgagccattggtcaaacaatagtaattaagattaagccttcgagtagttatttgggaactagtgagcaggacaagaaacctccaactacataagtcccggagtctcctctgaggaaccaagaggtttaaagcaggatagaactatttttatgaaaacacaaacaacagaactgggggtattgcttggtggtagagggcttttcctagcatgcaccaggctttggtttcaaccctcagcactgcaaaaaacaaataaacaaaaaaccacaaacaaaaccaaaatgcagaaaatgccaaagagcaaacaaagcaaaaaacaaaagcagcagcaacaaaaacagcaaaactagcaatgcccccttcaatttatttatttatttatttatttatttatttatttatttatttatgaggagctttagatgaccacagtgccctggaatttcccccaggatcctctgtgtaacaaaaagaactctgacgaatttacagaatgtaacattgtaacaaggaggcttccttcaggatgacccttgcttgttgctcaactttccagaatgtaggggaagagtatttctagggttttccagggcctgggtgtaacacttctaaaaagatgccggcaggaaataaggccacattttgttttctctgttagcaatgatgattaaatgaagacaaggcaaactttaatgttctccttcttcaggtacaactttccagtactgtccaagtctatcccaccactggcctcatttccatctattgagcagttaagacacttcaatcagcagggtgttggtggcgcacgcctttaatcccagcactcgggaggcagagacagacggatctctgtgagttcgagaccagcctggtctacaagagctagttccagtacagtctccaaagccacagagaaaccctgtcttgaaaaggaaaaagaaaaacaaacaaaaagactcttcaattatccaatccccatcaatattttgagatatgtagagaatagacttgaacattctgtttaacagtcttaacttgtgtgcctatattctgggagagagttatcttttataaataaaccctgtaatatcacaaagagagtgaaccttcccctgtgagtctgccagtaacaacatgtactgagacagtctataaacagatagaaaattctcacatgtccctcaagagccaccatatagagcctgtacgccccccccccaattcccatctctaactcatttatactaagtggtctaactggtttggagtaccttgtacttaggtccctgttttctatgcagtaaactattgaggttttaattatctgtgtttacctaacacagtaatctgccaaataatttgcttatttgacaaaatgtgtgtgtgtgtgtgtgtgtgagtgtgtgtgtgtgtcctattttgacttatgaaaaaggcaactgttttgaagattgaacctctcaactctgagcattagaaaaatagggttaaaacatttctcagtgtttactttctctccagactgggttgcacacctataagaattactccttagcttccagtccccatcagggactctctaaccagccttgactagtctcagacaatggaaggatatgcttaaggggtggcttaactcttacaatgactacttccattccaggtggtagtttttatactttttagttgttttaatgagtaataattttgtgtgtttgtttgcttttatttatttatttattttgcaaggtctcacgtaaccaaggctgccctggaagtctgtgttgccaaggatgaccttgataatctgatcttgcctctacctcccaagagttgagattatagacatgtgtcaacatgcccagttcccagccctctgtgcaggaatctaggcaaatactatgccaactgagcttcaagtcccaccccagcacaaagcaatccttttagacagtgctagctatccaagtcagagtgttgatggaaacagatatggcaactgtttcttctccaggtgaagtcaagcagagtaatggttgagtaagaacttctactctctatcagttatgctcatcctgagcccagaagcaaaagatggtagagacagaactaagtcacaatggccccgctggggcacctagaggtacttcctgttgctaggcctcctgggaaggtgtgcaattagggcactggtgctcagagtagatctccacagcccagtcaggctgctcagcctggggagggcctcacacataatcttccaacattagggaggctaaggtaagagggtctggagcctcaaaccatccaggcacacatactgaccaaattttcaaaaatgtagctattcagttaaaaatgcaaactcaggcctgactccagactcacaagacagtctggagtcagggcccaggaatttgttttaacatgtcatgagggagttctgcaggaaatcctgggactagggtatccctatagcctccatttgctttacaggactatgttctcaccatgaaatttagagctggccatgagaacaaaaagttcataattcatttcgtttacatgcactgtcccttagttgtctatacatcctgttccagctgagactgaggagtaaattccgcaagcagaaacacccaaaatgaattcatacacataaagctctaattagctaggtcattcagaccaaaatttgtccctgtgactggtgagatggctccgtaggcaaaggtgcttgtagcttagtctgaaggtctgaagatctgagttcaattcctggtacctatgtgatggaaggagagaactaactcccacaagattcccttgatctgcacatgcatgccatggcacacacacgtgcatgtgcacgcgcgcacacacacacacacacacacacacacacacacacacaaacacacacacacacacacacacacacacacacacgtgcacacacgtgcgcatacaacacacacacacactaacattttttaaattgattcttatgcttctaggaagttgtacatttacttcttcctttaatttttcatttacttcacccagtttaggctttttcataatttgaagagaaaaagcttcaatctgtaaggggctaatatgtggcgagaatgctggagacagcagtttctcttatttttgtccctggcttctgcctttctcaagctgaggggcctgtgagctaagggatttgacttttctatgtcttggtctcttcgttctttaaaatgcgactccaccctcatctgtggctaaaggtgttgaaggagatgttctatatatcagtgagccccaataccccaaactagacaattaattgctaatctctgggtcaagagttggcaaagttccccaggtatgttctgtctgcagatagcttgggagttgggagcatagttcagcttttgcttagtatgttagagctcctgggttcaagctccagagctaccaaactaaaccaagaaaaagccaaacatactaataacatactaatatcgagttggagatgttgcttcgtgggaaaaatgctttgcctgtgtgtaaggtcccatatacaatcaccaacatggaaaaaaagaggcatggattggtttggggtgacctgcttttacccgtagctctacagggactggctttgggctcttagaaattcccaggtctcagttcttattgtgtattacaacaatcagttagtgaagtggataggagattaggtgcagtcaagaaaaggtcagtgcttgattcccagcacctatttcaggtggctcagaatgaactgtaactcctgctgaagcaaactgaatgcttctgtgagaacccacacaatcaagggtacacacacacacacacacacacacacacacacacacacacacacacagactcaaggacacatacatactcaaggacacatacatactcaagggcatgcatttgcaagcacacacacacgcacacacatgcacacgaagatctttttgtaaagagcattccccccccttctgcttactttgtaaggaaaaatgttccaaaaagcatatgttgagaaataaacgtgttatgcaagactactgtgagctgtgcaaatgtaaatgaaagggtaatctttacaaatggcccatgaaaaatatgctaagctgcaaaaatgtcagggacatgtgtgagatgctaagtcactagcacaatggacttcaggggcttggtcggttctgttgttaagatgtctcctcttaggttgtgaatctagggcaacactcccaaggttcaacagagaccccccaatgtggtgctctagctccctaaaggtattgcctgaaggctgttgcagaatggattcccaaccctctgagtaagaataggtgtgagggcaactacccaatgacactttaagggtgaagtcaactggtaattgtaaactgcagccactgttgaaaggagaaggaagcaggtgaggaaacagagtcaggttaactgaaaaccatttgtgagtgacattgtcctgggaaccaaaatttcaatatccatctaggaaacttaaccgatataaatgcaatactgtcaaggcgaggccagcaagtcccacaacgctgaccagcaaggcatgagtataatttaagagtatattttaagccaggcagagaggtgcaaacccatgtacccagtgatggaaactctaaggcagtagggaagatcaattaccacaggcttaaagtctgcccaggttgcacagtgagttcctggacatcctgggctaacaactaactgagcaagcgatccatctattgaccagattatagttaaagttctgtggtcgagcaattgcctagcatgtgtgaaaccctgggctcagttcctccctcctctcctttcctcccttcctttctcctttcctcttcttcctgcctcgcctccctgcttctttctcttcctcctgttactatggggatggagcatgggacctcattcttggccaaagctctaccactgagccctatgcccagccttttcttataactgtacttgtttgaatgacattacaatgtgagcagtttatttatctaacagaagacaacagacagaacttgggaaatcaataggcccagcaatggaaaagtactgacagaggcacaatgaattacttatcagaccagcggtgagagtgggggctcactcacaaatatttaaatttttaagtggaacagggcagattcctggccatacaccaatgtttctcttcctactgcccctgtgacttctactcatctctaatatttgttcatcttagggggtcagcaaaggcttccagaacagagacctcaactaagagctaacactatctccctcaggtttgtataactctcctaagagataagcttcctgtcagaaagacaacactccagtcatcattagtaaccccaacaccaccagacaagtacagaaagcagggcctcaaagatggaaggagaattctcaatgagcaagaataagatgtcatagacatgtggctttgaccatttactttaatttttttgcttttgtttttgtttttagagacaggatttctctgtattgttttggaggctgtcctggaactcactttgtagaccaggctggcctcaaactcacagagatccgcctgactctgcctcccgagtgctggcattaaaggcatgcaccaccaacatccggcttaaaaattatttttactgaaacaaatcttacacataactgccctctgcaactttttgtacttcccataggaggcaggcaatggaaagggctgtccagggctggagctcagggagacagctcaaagccgtaggttcaattcctatgccacaccctgcactcatgcacacacacacggacaggtaatttgaccctttgccataaactttgtatagtgaatctcaaactcaaccctcatcttcaactggagatgtacactctcaggctgcacctgcagagactctgggatgatgtcaggcatgatcaaatctcaaggtttgctgtgcaacactctcttcaaagtcgacttcccagctatggcctttcccaatataccacagaccatctgcaagctcttttgagccagtgtttcagaaccaaacaagacacaactcaactgttaaaaaccatcctcggtgcatcccaccatgggggtgaggatgagggaggagacataagattcaaagattaacctgtctcttgtccagtttgtcataggctcctgcaccactcccaccaccctttgcaaatcgttgtgtaaatacatccacagcctcatgtcaagtccccagctggctcctggcctcagccacagtagccccttctctgctgaagaccagccccttgcgattattctaggcttaatgggcctgacctgtgcaatattttttcaatcaggctacagtcctatctctaaattctcagttttgaatgaataccgattttgtgacatgaagtccgctatataatgaaatgcaaacaatggaaaggctaaatcagtttacaaaaaaatctatttgtcaaacagtgtggagatgttcccaatttagcccagcaacccatgcagttcttgataagggagctaaacacctagctgttcgccaaatgaaaataaaggcatgtgtaccagggttatattctcctttcaaacatctttgttgtaacttgtagctaattaaatgcccttgcacacgagatgcacacagcagcagaatcagggacttctcttacaagagagcagggagaagagccagccccacacaagcttcctgagagagctcctcttacactgaatttacatttctataaggcttcatcagcctggagaaaaaaaaggcacaagaggaagcctttcttgttcaattggaccagaaagatttctaagccctgtaaaggaacgtgctcaacatttaaaaagaagaagaagaagaaaagaaagagagaaaaaagaaagaaacagtaactcacccttagatgctgggcatagatagctctttctatacaacagacagagtagctaaagactttttagggacccgaagggtttgaatttttatgtgtagcattttcctcatgcctggaaattgttggcagacagtagcatacctgtgtgaaggctcacactcattaaaggtgttctaaacgtaccgtgccacacttgtggaaggggcttgtgtgtaacaatagactagctagatagtggaaatgtgggcaatgtgggcatgcttcaccccttctgaagtttactgctcccttagaagaacttgaatgttaaccctctgctgaatttggttattgcacagaatgttgagttgtcatagtccctactagagtcacttctttcacactcacccaacaaaaatggagcagcaccagataggcagagtgtagtccccacagaggggacatcaccagagagttgaagttcattagggtctgagtaatttatattgcaatgatttctctatgtctgctcacagttcacatgtagatcctcaggtttaaacatcaccgccagagtaccctcccaacactcctgactccaggatatacccctgtgtgtaccttctggcccctgggggtctcacctccatatggaaaccaagaaaggtcacctcctccccgggggcatcttgtctccccattgttttgcattttcatatcttcttgtgcgtatttttacttctcctgtgagcctgaaagccttatctctggatgctcagaaacgagcttaggacctcgcagagcgtagatgctctgtgtctccttattaagtagatggatgggtacagcacagggcaccagtcttcagcttcgcattttctatcaggtgagtgatgaatgaatgtgaccccttgggtcatgagaagaacaccccacttttgtatgcaggttcacatctgtcagcttttacatcccgttggttctgacccacatcgcctccataatcttaacgttctgagcaagtggatgtcctgatcagcagttacactgatttccctccatttctcttcttcgtttctagcccattccatatgctctctcacacaggtgccctgtatttcccactgctgcaaacagagttgaggagttttacactggaacacagatctgttctcaagctacctcaaaccctctaggctgccctgatttttacattctgcaccaaaaccaggtgtgtaaggagcacccctaagcatgcgggagcacggccctgccattgcacaggcaatgtaggccctggccctcacatcctgcgcaaagaaggcaatagctttacagcttggtggctgggttggacaaggccacttctgggcagagtctctagaagtgatttgggaagaagtgttcatggcaaattagataatatctaattgcagatggcgaaggattagatttctccagttgactgtctgctccttaaggacaggcactgtctagttgatgtcaattgtttccactgtgccttgtacacagcagttggccaatcactctttccattcatgaggctttgctgagtcttgtactagcttcctctaacctttaatgtgattctcgacatagagtagaaactcaataaatcccatttgcttgaacagaaatagttttgtaacattttcattctttgccaaaacacagaaatagagtgagatagagaaggagtacgatttcaattaccaggccccaagaatcttccacaaaaaataaagaattgtatcataataaacataaagcaggtttatttgtttacacaccccaaataaactatacatataaaaagtacttaaaatgttgtattcacatcgccctctgctgttggactcgcttagataattaaaaagacccttagacttccaatttgggtggggtattttccccagagagaaggttccccatgttctccgatgacaacaaagtgtgttcaacagtgattgagaagccaagaggttcacttcagctgttaaggattgaattctcacctccaacaaggtacggcacctccaaaacatttgcttaatggggtgaattcccctttctgtcaaggcagtgccgtgcgggtgtcattagagagccacagcgtgaggctgctagctgtaccccagaaaagaggtgtgctgtcaaatccaaaacggcacagctctgtgacagtggcatactgtgaaaatgtagcccttcctcaaatccagtacgtgaggtgttcagcggacagcaaacaagcaaggaaacagccacaatctgtgcatttgctctcatcaataggacagtgtgccagcatggttgaaataaaataagaccaggtaggtagtaaccactggtatcatggggggagcactagaataaatatctaggtaataaactcacattttttttcctggctatgtgaaggaaacaaagatattactagtcttcaggaaaatttaacacagaacactggttaaaatttccccacaaacaggaatgtatttgcagaaagtcttcgaccccaaaacaccaaatagaaaatagctctcgacacgattccatttgttttttggggggtacttaatgcaagccaccttgcactaactcacaccacctttggctgcctaggtgtgtcattaccaccactgtcaccaaccctgatggccatgggtcctgctcatcacagacaacattgcaagtgctgccagttaacaacaaattaactctgtcctcaaaatctgccgtcatctgacttagcgggattcacaactttaacatcccaaccccatgaggctctgtaatcttcatagtaggcagctagaagaaatatactcatcctgttgagagagcacccagcttttgctcttggtcgttatctttactgcccttgggtaccagtgcttatgatgccctgaatatgactggcatgcagtgtagctctgttcacctgtcatgtattacagtcttctttttctcaaagtgaagagggttgagagaatccagagaagaaaggaagagagcaactgagacagtaaatgcaatctcctctgcttcattgtctgaagaaacagcaatttaacagagaatactaaactttggggtgtcgagtcaatttatctatactatatttggcaggcatttaacacattgttgttagcaccaagctaagtgccaaactaaatatttacaagcaagggaaatgcgagcctgtatcctttccttaggaggtaccagctaaacaaggctcctgtgggcactcccatgatgttctaactgcatctctcacctaaagctagcacgtgactgtgcacacatgcatgcctccctgtatgctcttgtacacagaggctcaccagtgcccacaatgtacagatttgggtcaagtactttcaacatacacaaatcataaaaactaaagtttaaaagatgtgcacacataggactgcagaggcattttttttgtaggttttcctacttttctgtctacccctggtgacacacgctgtgttacctatgaatagtttcttttgggtggcaaatgtgtttcattcttccatctgtgctgatggcagcatggctggcctcctgccataggagtgccatccgcctgcacaatggcctcacaatccccctctacccactcgcttggctctccaggtgaaaaacaggtacagatatttttctgtcattcactaaggttttaattttggctccttgttaggatacatttctctgcttctgctctatttaccaaccttgtggcctactttgctatggaagcagtcttaagtccctcaagaagctgctggtgatatccaaggacttcattgggggatcttgatttttcttcatgaactcattttcaagagcatctctgaaagacagtagcactccctggaattttcatttcttcttaattttgctgttctgttcttttttccctttttaaattcatttaaaaatatttaaccaggtctgctctctcacagggatggtgcccgccctagaattcctggcatctttagttgaaggctgaggtggcctctattttcccatgttatttatttgcacacaggccaagagggttactgtgtgagtgtggtggtttgaaagagaatgtcccccttagccttgggtatttgaacacttgcccccaataagtggaggtgtttgatgaggtgatgtggactttttggagtaagttcaacactgaagtttggctttgagagtccctagactcaccttacttcaggtgtctctctctctctctctctctctctctctctctctctctctctctctctctccctctctctgtctctgcttcatgtttgtgatttaggattgacctctctgcttcctgctcatgccacccttcctggtgcttcctgccatgctttcctgacactatggacttatactccttgggaacagtaaagccaaaatcagctctttctttcagaagtcacttgggccatacaaagaatttttgtcacaacagtgaggacaaactaatccagtaggtgcttaggtgacattctatgccattcatttcccctttctgtaagtttattcctgagaaagtcatgtaactcttccttttctattttgtacgtctataaatgtcatcttggagaggagtgactgtcatttttagatatgaggaggagatggctctatgggttgctgtacaagcatgaggacctcactttggatcccaacacccacagaaaacaaacaaacaaataaaccaaactgtgtctcggtgcccacacacatccccagcactggagaggtagaggagggtcccagggactcactggccagttagtttacccaaaaggccctgtctcaaaaaataaggtggagaatgattaaggaagatgctcagatactgacctatgtcacccacatgcaccatgccatcttgtgtacacacacacacacacacacacacacacacacaatggacctcctacacacataacaacggctactgttgttgactcacatgctgagttatctttagtttttcactcttctatgaggtgacggcctacataagaaatgcattctactccctggaaagaaggaagcactgtagaacgtttagtgaatttagggcttggctgggagtttagactgaagaggagtggaatccacttgctgagccctgtctttagggtagggctgaagaatggacctgtgttgctctgtgtaacctcaaacacagtcaataaggtggaaaccagcatgacctcttgtactcagatgtcatcttatctcgacttcacagtgtctttaaaacacatgctgtggtgatggtgacaaagaaacacaaagaaagaagtgaaatccagatgctgctatacccaagagaaccaagcggtgagtgaccagcctgggatgtgagtctctgggtggctcaaggctgtgaattttctgccacatcactgagtgcttccctgaagcgggtaaggagggcatgtcttagctggccaattaaaaggggaaaagtaccaaaacaacaaaacatttacagtcagaggcaaaagcggcctaatcactcaggccaatttcacatctgctacactgtgcaccctgaacaggagggagccaccatcccaggatgttcactactgaaaacttgtttccagagtgcattcgtcttgccagggaacagaaactgaagcaaatctgaatatggggggaaatgtgagacagatgcctttttaaaggtatcagtcagaacactgttatcttcttatcatctgtggctgatgatcagactgcatgaaggctaatctaggagcagctctggatagatggacataaaagccgagaacttctggagacataatcaagtactcaccgatccttcatcccctccctagagacctcaaacagctgtcaaatgcttgcaacagagactggcccctcatcctagaaactgcctgctcattaaacaaatgaagcacacaacacacagcacacacacacacacacaccatacaccacacattacccacccacatgtaccacacacacatacgccatagacatcccatacatgcatacaacataccaccatccacatccaacacaatactgcattttgcttgttatgtgttaaacctgtctacatgtaattctaaatattgcccttaaaacaaccagatgcaacctcatttcaccaacttttatcaacaacatattcaaaaggatttagattattattaataattcaggatgatttagcagaagggaaactatcttgaagaaaccataatatgggctagaaagaattgataaatttcatgaagttgctagttctattaaattcaagtacacacgtaagattgactgactctttcaaaaagaccaaacacgcatgatcttatttagtaattttgcctattttcaaggtaaatgatgttagttttccagggtaatagattctgaaaaggtcgctgagaaaacatttaccttgcttggtaaattttacccattcctaggagcagagccacactgaagagcagttacctcactccaccaggcttcctccatctaaggaaccccccccaacacacacctccatccttcttcactctgttacaatagcacgggagaacaagcctgctagtgttgggctgggctgtggatcagtggcagagtgcttacccagcatgcatggggctctgggttggatttttttgataattattataaggatgcctgagtttggatcctcaacatccacagaaaaactgcattttgtggtgcccatctgtaactccaacactggagacccagaaacatggaacccagggagagactggctggccagatagtctgtctactccacccttcagctcagggtttagtgagaaaactttcctcaaaaacttaggagctagttgtcatgacacacactggtaggaggtgaaaggaggaagatcatgagttcggggctagcctgggctataagacaagttccaggacagctagggctacacagagaaaccctgtctcagaacaaacaaacaaacaaacaacagaagacaacaacaacaacaatagcaaaaaactaaggtggagaatgatcaagaaagacagaggtgctgggtcctcacaaggtcattcaatcctgtgcctctttctaaccctgttgacattatacccacataggaagagagccagctccctcccctcctctgcccccagccacaggccttctatctggttgctgtaggcatccctgatggaggaatgaagggggcctagatgcaaggggtatagtgatggtcctttcttccaaacaggtagagtgactctgccacagcatctataaatgctcaggacccaaatgcatgtggattagcctctatagaatcctgcctggaggcccggagagatggctcagtgggtgagagtgtttgatgcacagcataaagacctgcttttggattacagcacccacttaaaagccaggcgtggctacatactcctgttacctgaggactgggtggtcagaaactggaagagggctggatctggctggccagaaacctcaccacaataacagtgctctccatggtctgtgagagaccctgtctgacaggaagattgcagagacaggtagaggaggaatcctcctctggcttccactctgtgtacatccacaaacacgggtacattcatatatgggcgccccatacacatacaaactcacacataaaataaagtgtcctggttccactgtgagctaatggcttgcttagagagactagtcattctccgtaggccatgatctactgacatgtcagtgaggaaatggacagctcatacaggaggtcaatccaagtcctcagatattactcatccattgaaatgatacttggtgtaactcaaggtttacacttgcattcaggcgaccaaaatatgactcatgaactccattcacactttacctttctacttgtattacatggaacacttatttaatcaaccttattgaggctcgattccctataactgattgagaagaggatgctgtgaatcccataacatatttggaacaacagacacaacagaggccgttatgctcctaggaactttagtgtatctgctgagatggggtaaccagtgaacaaatacagagtacaaagaacaactctgggctggaggtagttcaacggtagagcaatggctggaacggactatgtcctaggatccatggaacagagcggagggaaggaggaaaggagaaaagagacatacagagcgcgcgtgcgagaggggggagagagagagagagagagagagagagagagagagagagagagagagagagagagagagagagagggagagagagggagagagagagagagagagagggagagagagggagagagagagagagagagaacctttctgaagcatcagataaaagctggatctgttataagcaataagttctcaacccacttgtaaatacccttgccaatgcctacgctcaatagtttataagaacatgccgagttcctctaacctgatggggacacacacacacacacacacacacacacacacacacacacacacacacacacatatatatatatatatatatatatgaaaacacataggacagtcagtaaacattaaccccaatgcagagataaatgccagaacatgattctaactataaacagaactacggactaatgtttgccacttagtgcttctggttgcttttgccgaagctctccctcccttggcacacaggctcccctggctcccctggctctcctctagtatttctgtgctggagtatgcaggtaaaccctggcatttttctgtctgtccccggttccccactctctaaggggcatctaccctgtctctgtggttctacagtgaaatgtttggttagatgtcacttgatcagctggattttgggaacttttcctcaagcgccctgattttggtgggccacctggaatgtggcaaagaagaaacaaacccacggctgggtgaagtggactttgtggactagaaatcaccacacactgcggggtgtaccacccgtccttgcagacaggcgtagagcagcacagccgccagtccggtttcatttgctgttagcaccggcaattctcagcacctgctgacgtcaaattactcatcaacccctttagtttctatcagtacatggactttatttccatccattctgtttctgggttgggggcaggctacagatgccccagcagcagtctgtttgcagaaggcctgtagagttaaggtgtattttttttttttttgcattgttccaccatcacttaggcatcgattagctggcctccatggtgcactgctgctcagggctgggtgccatcctgtgcactgggcagacagacaggatggccactatcctcaactgtttgtcctgtctctcaggttccctgagaccacactgaagcacctgttaaagctgcttctgctaagctgggctgcatttgtttggctggatttggacttcctggctctgtgactgaatacaaagtgattagagtccagtgtttggcaacacacaccatggggagcctgctgtgtgggtctccagagcacaatgtgttcttcagatctccatgccgggagcgccctgctaaagtccctgtgctgaggagaccagaatggtctccgatgtcatcagctgctcaccagcagctgtttaatgtaattccaaatgatccgcctgaatgaagttatcgttccttcagtaatctttaatttagtaaaacacatagccaagcaatactagtttaaatgttatctgagattgtaaaataagtttctgatccttatatttgctgtgtagacaatagagtaaaaagtaaaatgtacgctgagaagcataaattagagaaaggggaaaaacaagaaatcgttagcaatattacactcatcaaagcccaaggtgtcaactgtgagttattgaagcaaagatgacagtaaataaagtgaatgaatgggagaagtttccatcgctcacctcatgtccaccatggctaaactgaagtgtgcctcaagctgggtgtgtgggtcacgcccgcaatcccagaagctcaggagctgagacaggaggaatgccacaagttcaagatcaggctgagctacacagtgagttctgggccagtttgaactaaagtatgggacttgttttataagctaaaaaacaaaacaaaataaagtgaagccatatttcttttgaagaatagttcttatgctaacaaatgtaatcaggaagaagtatagtcatcccatccttccagcatttagaagacggcagtgaaacactgcaccaccaacaagctagcctccccgcctctctgcccctccctctcctgcctgcctgtctccctggcttgcttcccttccctcccctccccttccttccagcacagtcctggtttgcagaggtggtctgtttacaagtcagacactaccaggctcctgctcaggcatcgtctgcatttctcccatgaacaacagagggcactgatgcttctagtctggcagccattgcctgggagagcgcagactgcttgctctgcttgtccttagccatccagctagcccagctctccacctggaactcctcagcaggctgcatgcattctttctctgctaaatgtccttcctatttctccagatgccaccttataaagaatggccattcgttaagggctcatgatgtgtttaatctgtcagcccaagattctgattatggatagctgccctcgaagcacattttctccccaaccccacttaaatacagttcattccaagatacactactccagcaccttggcctaagaaataaaagtccccaagtccatgaccctctatgataatccgtgtcctaacagtagacttttcagtggcagtttaccaaatgtcacacacatcaggaaggccacaggcaccatgccactacagaagaacacactggggtatctttctttactaaagagcactaccccccccacacacaaagccataacaagttcaattgtttcacctgaatcacatgagaaataccatgtgtttcgccgatgccctttgagcaaggaagaaaagcacatgcatgaaatgcctaggcagaaggctatctgtttaaccattttctcactatacaagcttaaaagctaaaaccagctgatcagaaaacactatcattttctgagcggttcacaagcacacgtgattccatctagcatggcagtaggctttcatggacctcttttcaaaaatgcctacccagatctctcattgctatttgaaggcagatttatttcttagccgggagttggggatctcagcatgccagattgcgaaggcacccaacaccaaagagcggatgggttattcttattctccttacacctcaaggagaaatggggccgtgtgtggctctgtagcaagcaacgttctttggaaactgtgggttcatctggggctaatttagcaaggtggtgctgttagaaaaataccagagatcaaaaccagtagtcttcagagccctagtgagacacactaagggacggcatcttagggactgtgtggaagactcagggatgtcaccagcatccttctaacttaacacaaggtttgattgggcaagggatgaggggagtgaggatatggctagcagataaaatgcttgctatgcaaacatggagaccagagttctggtcccccgcactcacggagaaggtgtgtaggtcacctgtgatccctgtggagacaggagagcctggagtgagctggctagctagattagttggagttagccatctctagattcagtgagagaccctgtttcaaaaataaaacagaggatattgaggaagacactggagtcaacttcaggcctacacatagacacgcatgtgcatgaacacacgtgggtccacatgcataccacattgcacacccatccacttccaagaagaaaacaattaattgcaaaaataaattagtaaaaaaaaaaccctttggttatagaaatacaaggaattgctctaacatcttcagacatctgtgagttggagtaggaagcaccactggattgctggaagattttgtctaggcccatttatgtgaaaggttcccataattccccccaaaacatttctctacatttttctctgcctgtccccactctccatccgttcgtcccctttatcactccctgccccgggaggcatgaatggaccttaaaggccttcctcagcatgttttttctttagaaagtcaaggagaaagctttccccagacaacccaccctgcatctttcttctgtgtttataaacaaagcccagtatagacacagataatctatcttgtgttcttagactgttcctcatgtctaggagaagagtatcgggttggatttttctttatttttggaagaagttctatctatgccatgcctgagcttgctggcagccaactccatttcccattagaaagtttcataaattacaaaccaccagagtgagagtcattacatagaatgggccttgccatctggtcaaccactttgacatgataaaggccatcatcttggccccctggtttggacttcaaggggacttcggccacaataaagataatagatgctcttattccaagctcactggcttattggtctattttattttattcttcttttatatgggggctggggtttgaacactcagcaagcactttaccaactgaactaacagctgatatccccatatcctcacatggcctttcatccctagactattcaggcaattcaaaatgtgggtgttactcccattcatcagccggacagctttcagacatgaagccagttggaaaagcaggatttgatttcgatttaacagcaagaatcagtatcttcctttctctacttcctttctgcacaaagaaacgtcacacacatttcaagtttctggaaagttccacagtggtgtcacaggcactagtaatagggaatacatttctgatggaagagataacaggtaggagagttcagcccaactgctacaggagactggggtggggggtgctgttccagaagttgacaaaatacagaacaggaattaattcttatcttttatgttgctacacctatcatccatccatccttccatccatccttccatccttccttccatccatccatccatccatccatctatctatctgtctattctttacttatgcacgagggactggaacactactgccatagtgagcttgtggtagtcagaggacaatttgtgggagatggctctctcaatccgcaatatgagtccaggaattggactcaaggcctgggccttagttgcaagcacctttacctctggagccaccccgaggaacccaggaacaattcagtacttttatatgtgtttgtttcctgaagcaaagggcaaaggccctctgcatctggaccacattgctaaagatctggttttctcaggctttcttccttaccgtgttgggattgaaccttgagtcttagacattccagacaattgtcctacactgagcaatgtctccagcttatcatcttcagatgaaaacaactgggcagtaaagttaaaactggccgcatcaaggtttgttgctttccttttatctggttcaggctcttcccctatgagatgggtttgtgctaaccctgactccatgcagctgctgggaaaaacagaaaattttgctatctttcccactattgctgctttgttttttccattcaagtttcaaatttatcagaatccaaaagaggccagcatagggagcaaagctcagcttattccaatttgatgacttatttccctgaatcaaaatgttacatttgactttgctgtctgtacaacctactgaccttactgattaggatggctgaatgataaatgaaagccatgtccacaactctctctctctcccccctctctctctccctctctttctctctctctctcatacacacagatgtgcacacacatacgtacatatatacacatacatacacatgtgtatacataaatgtgtatattcagagatgcagaatatctccaatgagaagtttctgtgaattcataaacttgtctcttgtctccagtagtttgtattgacaatttagaactgcatgtctgtgctcatatatatatatatatatatatatatatatatatatatattatatatgagaatccgtcagattctcagattttaataggggttacttgtgtaaatatcagggtggaaatatttatctgagcataggccatttactggtgactacactcctgaagacaaatgaatctgcctgcctcaacagccattacaccaccaagagctcctggacttgggggtggggagtgagaccctggttgtgaatggtaatgggcgctatcttactcaggaagctgcatcttatgagtgcactgtcatgtcatgggcagaaggaagtgttccatagctctcttcctgatcctccagcacttacattcctttcttcccccatcctgcgtgatgcaccccaaagggcattttcaaagtacatattagtaacatcattgactcctcccttacaaaaaaataaagatggataagaaaatatcaataagaatttcaactagctaattgtaccactgcttgcatcacgactatactctgctttaaaaatgttgttaattatatttcattttttgcttttgagacagggtctctttagttcagactgacttggattcattatgtaacccagactgtcctcaaactcacaggcatcctcttgcctcagccttctgagtgccaggattgaaagtgtgagccgcatgccctgcttttattttatttttaattgacacataataatagcataaatcgatgggttatgttccatttctaaaaaattaatcccatgggtgcttttgggttttctgcatattttataagagttttaaaaatacataaaagtatgtctattcttacattcatatggttcttgagcaaagcacatagtattgtaaattaaaaataaacccagctcttacatggctttctagatgaaaacaactatttggaggcagcggagacttagttgttacagtctcatacccgactgcaggaaatgtaggttttgagcttcatggggttgggtagagttgaagggctgtgtgcacacacacacagtcttcatttactgagaactgggctagacagtcactagtaattttgcatgggacataaagccagacttctgggagccacccctcctctgctatgactatttcattcagtgataccacctccatttagcatctgcttatcctactatgttgcttccaggcctttagtcaaaaccatgatgattttattgtctttttttttttttttctttccaaaccatcagagctttcaaaagtaagttactggtctgcagctggacgatttaaaggagacaggcaaaagtcctttcaatagcccggaagtgtaagaatgagaagaaatatgtccttgatcctgttccagaggcctggctcccaaggaacccacagttccccatggccctttgcacacctcacacctgtcagtcctgtcttttacaaaagaaaagaaagggctgagacttaactccagtggatgctccttctggtctatcccctgcaaaattaatagtgtctacctggaaatatctttcctgttactcccctggtttgagtttatcagcaactccttaaaacaacaacaagacccacccaccccaaatttcaatcactaacaatgaattagttagccctaatcattgttgtgaagattctgagatcactgggacctccccaccatttacacacatagccaacccttaacttggagtatcattgctcagcatctaaggccagagagacagacttacctgtcgcctttgttgtcacggtgtatcagtgatggcagaagatctgctgggggtaggggttgaacggaatggatcacagggactttgtcagtgatttgtggatttcctctcaaatgttcctctcctatttcaactccattagaatggataattgagaaccgatgacacaggtgggaatgcagccatccatccacccaacagatattccaagatgacaagagggacatcaaactcactacacataactgaacctccccaagagaggcagattataacagagtatgggagaaagacaggaaagcgtcgtgttgtgcatttcagatgtgcccgaacacacttaccaagagcaacacagaggtggaggctgcatagagacgcactatggatcccaaggtcattcttgaccctagctcatccatcttcttcattaagatactgtgatttttcatagccattttattgtggtttgataatgtaatacatgcacataatatatttggggcaaatcctttccttccctccaattcctgcatttcccaccactactttttccttctcaatctcgtgttcttttctttaaattatttatttaatattcatacatgcataaaatatgtttggataaaatatatccccacattatgtgtacttaaaaaaccacagagtccacttagtgctgtctgtctatgcatgggtatagggctgttttttggagcatgggtagtcagtctcttaggagccacacccctgaagcaaacagtcctcctcctcaaaagccatcagttgccaaaagctcctcagtgaggagtggaccttggtgagctcctctctgacccgtgctgggattgcagcagatttgatcttgtgcaggctttagacatgcagtcacagccattgtgagttcatgtgtgtatcatccctatcatgatcagccctgtcagagttggcaaatacaatttcactgcacatgtccactccctctggctccaacaaaaatattcttaatgaaattgtacttggctgttttcaaaactgcacaccagtgaacaaatcgtgcttccttctaagtctccatctttacagaacagtagcaacttgcatggctcctcttcaaggaggaaacgagagaatgtaagacaccatatatctttgccatacccaggcaggaaccctagatttcatatccccaagtcagatgctacatgttcacttatgcagaagaacactttgttgaataaatgacagtgaatcgtccaaggtctgcatcatgtgctttgttttgtattgctctttgttttaccaatcaaggcatcactgtgctgcctaactaacctcctcaggggagcagcagcctcagtttccctaatgacttacactacaaatgcatcgctgtcggttacgtgtcacaaagctttgatatagaattgatatagaatgtcacattaagtattaatcgtgtatacagatgcatagtctccatcgcatggggcagcacatacagagctgttggagaaaatgaaattcccttttatttacatttatcatgccagttcccacaggccagagaagaatggctttcaactcaccacatgctttcaaaccctgccccatcttcagttccttaaactatcaggaacttgattggtgaaaacacttcatagatgtttctagaactggaacttccctcttaggtataaacgatcaatgacagacaacaagaaatagagtacattttcatgctaaggatgtgttttgtaatttacaatagtcaaaggcatttctacctttctatgccaggggctgtttgcacctgtagattctaagaattatagttaaacctggtagtaaatagtgacaatctggaaatgtcgtccaaccctggctggtttcagggaacagtgagtctattacaactttcccagggccctgaagtgctcggctctccaggtagtatctccaggatcctgacgtaccccagagaaagggagcttcccactgccagaagtaaggaaagcttgcacactttaattttctcatctgaaaaaaaaatgtagatagcatctgctttagctgacaagcatgcaatggggaattcagagcaataaaatggagagctccagctttcaataaaatcctgtctcctcttgcaacactatcacagctgaagcacagggagatagcaaaataaaaacatactcttccctgtgttctaggataacagaatgctatgttagctggccggctcaaaagcccaggaaatactaggtccttgaataagagggggactttggttttaatcagggaggcatccctaggcatctgcattcctgtggccaccagttggaagctcaaaaaacttagttttgaacacatacagctctcagaacgggagcatctaaacactcctggagcccgagggaggtttcctccaagctgatttaaaagtcaaggcagggagtgttgggagagccccaagcagaagcacaggctagtgccaaagaagccggcatcacccttagatattatggaatgagataaaggctgcagagcccgttaggcgtgtgccccttataacccgccatcccttcacaggcaaaagtgggcattaccaatatagagcatgcctcaggggttccagaggaagcaggtgtcagagaacagacagaaaggggtgagcatgaacccattttttgttatgagtcacttgtggggtacccatctgagactctctccagtggggtgctcctcaactcctctccaaaggtcctcactgcaactggacatggtgattcctgctcaaaacacctcactaattccaactgtaaatctttattatcaagatttctttcttctctgctctcatcttctcagctccctccggtgtggggagggggatgatttgttttctctccgttcctggttatttataagatatctactctagattagtcctgcttgagtgacactctaaatggctccgttccccagcgctactctatttctgatgggagactgacaacccctacttagagtgtctttcatggagcacaatgaagtgtgagctgctatgaaaaggcctgtgtttcaaaacaaaccatctcaataatcagcacttaaaacacttttcattaatacatttctttgtgtataaaacaaaagcttaatgctgcaacatggcctttgacaatttaaaaaaaataaacactatttcaatttttagctagactgaaataatgaaaaaatgtgagggaggcttatttgaaattttacccacatgagaccaacgctggctcaaatggggttgtctccaaccaaaatattaaagctcaataaaaatgcaaaggcaaaagcatgaattagtaaatacagaatcacaacctcttgcttctcagctattagcaaatacctgtggtttagggagatacagtcctgtgtaatccttatctggatttgtaattaagacttcagagccacagatatctctgcagcatggtgcggcgctccgctctgctctcttaattttaaatgactggacccaaatcaaatcaggcttcaaatgcattaaaaagtacatgtctaaggtctaattgaactaatagatagcactctctaatagagcgactgcttactacccactgcagacagccagaacttggagggtaggagacatgcacggatgcgcagcattctaaaaacacgcagaaagacagaaggaaaaaagacagaagaaagaaagaaaaagccttggataactggttaggaactcatgatcctttgagccttaatgtaaatataacaagaacaaacttataagggtccactgctacagacctcgtgtcttggtctaaatgggctctgcattcgattgccattcattccccttaattgtcacctctaatagaatgctgtgagggtctcaaaatgaagcacttatgagtgttctttttcaatctctcgtgggcttctctcagtttatcacaaatgaacaatcatgttggaaggggctccgtctgtttaatgtcattagcgattgtttcataaaacaaacagccgctgcaccattcggcagcagttaatcttacatctaaatgtggtggcactcagggcgcgccttagacgggcttgttctcactgttgcaggcctcttaatctattgcaagtcaaggcgcttatctctgccctgttcagagcggggatttctttctccaaatactaaaccaaacgcagttaacattgtgtgtccagaattgcttttatttttaacccctgagcaagctttttttttttctttgaaagtgattcaaagtctacagtatactcacttattggctgtactattttacaaatatttcctcaatagtgaccaagtcaagttcttttacaggttggcgcctgcaaggctgcctaatcagtgactttgggaatcctgtctgataagtggctagacggtgaacagaaacacagttacagagcagccgatgatgggtgcctggaaagtcaaagacttcaggggagaaatacccataggagagttgacttatccaatacgtgttatgctcagctgttactgttacaatgatgatatcatgatttagtatttattttatcatacattgtcctaagcctttataacatattaattttcccccactgaatcagccaaacaaccaccaaaatgatattattgttatccctattttcagttaaagtaacagaaacttagagaggtgaagtaacattctatcagtggccctgcccacccaaggcaggcacacctgtcacttcaaacaaggtcacactacctttgaacacagaggttcttagccagggtcccttttagaaggtgttgtctcaccaagttcaatagccacatctgtaacaatcacacctcccggaatgtccaggaaattctagcttataaataattcttgtaccactgtcagataacatacaccagatttccagaaagaaacatagctggggtactaggctggagtcctgaggcaaaaagctacatttttgctgctcaaacccaggtcctgagggtcatttcccagttagaaccagtgaacttctgaatttcaccagcagagtgtaacggggaaaagggtgctaagaccagcttctgtagtggcccccatgggggaggcctttgggtgcaagctgtggcactgtactgtttcaaaccccctcagtgcctatccctgccagctgtccttcggctgactttgtgtttgatatttataaccccctaatgccaaacagaagatactgcaaggcagaagaaccccaagcatcaagctcattacgctgcatggagtagccactcactcagttgatcaaccagaaaatattgagtagtagctacattcccatgatgaggctagctatcaactaaactaatatttgtctttcagtgtaactattgtactaatgggacaacttttaatcgctgcgataattggttagagagaatctgaaggacatacctcatttgttttcctctcctgtgtcctggagcaatgttcagctagtcagcggggataggcaccttagcctctgagcatctcttagttctctaagtgaagatgtcactcctccctgcatctatttcctaatcaacatacctttggctcccatatcaactgtgatttctccagggctatcaccccactcactgtaacttaaatggagtgtcactctggcaaatttcacagcatccaggagttgcagtttatagactatgtgcaagtgtcccctcaaattgttagcaccatgagatctgggggtcttgtctcttttccatagctgcctcccaagcaggaaaagcaatgtcttgtagagaggtggggtactgcctggaatgatggatggatggatgaaagataaatggatgccttagatgacctcatattcataaccaatcaaaacatggaaacaagtttattgaactaggatggacacacacactgacacatgtagagattcttgtgtgacattaactgagtttcacggcctgcaatttttgttctactgtcactaggactgaggagataaggacatttttggtggatttgaaaacattctacagaaggtaaaggtggacttcatttaatagaagggtcagaagacaagacatatatgtgtacacttcacgagtgtgactagggaaattggtattttgtcaagatatcaattcaattcaacagtcttcagcccctaccagtaggacagggaattggctagaaactttgagatggtcagagatgattaattaacacattatacttttgagagtgtacgagacaggagaaagagagcaaggtataattaccagatacacagtaattcttttgacaggtttctgggatctattgagtctccttctatgatacagctcaatgagtagcctcaagaccatgaattctgttccccaagtccaccccaagcccttgcttgggaaggaacatcagggttcaaaagagaaagaacaggtctgggaagaatgtatccagagtttgacttccccttacactggttccctaacacacccattgcactaacacacaattcttctttgctccttcaacccgactgctttcccctcaacagttcgcattttccatgtacaaatttgagatcttcctggctcatttctggatctgtatgattaaaagcccctatttagtaactgggtcctcacaatcagaccaaaccatgaaagtagatgatagaagccaggaaacgacataacagaaaaatcttagcaatattcttagttcctaactttgagtaaatatccgttatattttttttacagagatatctacatagtatcttaaagcagagcgacaagtaagcaaataggggagggtaggttgaattaattttgttttcatttctctgccagtacttactatctaaaacaacaacaagaaagtatttaaaaacaatgtaacaaaaaatatcgtgacaaagtagcaacattgatcttttacctatatgatcagtcctccaaagctggtgtttttggtacaggcttaattattcccacactgtgaaacatcttactgcttgtcaagtacaggaaaccacaattaaaccctattacacacatgctcccttcccaaggttacatagtcggctatggattacagtttacagcttggagctgcccagctttcagtgaattgcacaggttccagggagttggcttcatgccttgcagcccccaccacaccccaggtatatctgcagcacctcagctgactgactctacaggaccacagagacagggtcttcagttaacaaagcaacaggcagagcagccctggactgaacgtaacgctgtaggcacagtgttctattaattctcctagcaacactgcagatggttgttagaatactaagtgattaatggtgaccccccctctctctacaaatattctgggaaaggaagcttggtggggagtgggctatgtagactgctggtctctgcaattattaagaactagttgccagttgagtagagatttagtttatgggcagaatgtttacctagaatatccaagccccgagtttgatctgcagcaatgcaataggaaggaaggggggagaggaggaagagagagggaagagagagaaggagaaaggaaagggggtgggaagtgataaagggaagggagggagggtgggagtgaagctctgtagtaacaccttttccggtggttcttagacctacaatctaactcactagcccctaactgttctctccaatgtagaaacagaatggtgtatgtatctccagggaccacgagtggtcattttggacaacatgaccagcaggcatttaggcagataggctatgtcccatggatgtctttccatgatcagttctcatcatttatagatgaaatggtctactgaaaagtggactagctaaaaccggaaaggacacagttgtactgggagccatttatactagcaaataggtcttgtgagaaaattagtttagctcgttttttctcattttggtttcttttctaaatacatcagatgaattaccatgcaatattttaaaacgtgtacagggagttaatattttcagttctcacagtaagtaccatgatttcaataaaacacacacacacacacacacacacacacacacacacacaaacaaatccaaaaccttaagttggaggtggtggctcttacctgtgtcattgtagtattcaggagactgagggtgttggattgagggtaacctcagttacatagtgacttctaggctgacggagctacagaatgagaccttctctcactctctgtctctctctgtctctctgtctctgtctctgtctctgtctctgtctctgtctctctctctctcacacacacacacacacacacaccaagtgcctttactaattacttgctctctattgcaatggtaacaataattttaaatgttttctcttttaccaagtctggtttatttgaaatttctaaccaagcagtagaatgcgggggggggggggaagagagggaagttagagcagggagagagaatgagagaaaaaccttaacaaaaggaacgctagtgagaggggacctgaagatgacagggacctgcaagagggaacatggcacacagagccttcctgcatggcgggcatgaattctgtctgagggatagagccagtgcaaagctgggtgggcagtgggagcaatctcaaatatatcaactttgtttgccttatattgcccttcctctctccaatctcagaagaaccttccagaggccagaaaacccagttttcctgttgctgtgacccacagagctcaccatggtaagcacagagccagtaagaaaggaagggcctcactgggaggtgaagcagatgggagatgttggtcatggaaaagaaaaggtgacagatctggtgggggacatcacaaacaaaacggccgtaaggtaaagtccaggatgaccagaacacagtccacaggagcagtaatgatggccacagctgcatttccttgatttttattgtgtctcatggttctaaggaccagggacttaagccaatcactctatagtaggggctggagctgaagctcagttggtacttaaggtgaaggggctctgggtttgatccccagcgctgcataaaccacccacaggcttggcaccaaggtggaggcagcagaatcgcaagttcaaggtcgccctgtcacagtgcatttgaggccagcctgagctacatgagacccaacaaaatctttttaaaacaaaaccaaacaaaatctttttaaaaaaaagtcctcacaggaacctcatgaggcaggccccaccatcgtgtcaggctttctgaggaggcttgagacggcaagggctcactcacctgcccagagctatgacatattagcagcaagctgctctctggtgctttctggaaatctgtctggtcttgctctctcagaaggtactcagggaggtcaaagcagtctcaagttgagtggagaacaagagcccaaagcagatgaaagcacccagcatgtggggaacatgagccacagtgacacaaacagacaattagaaagcagagaaaggagctggcccagcatcgggcgggtgttggagccccctttccctgggtgcacaaagctttgcacatgctgtccccacagcgtggcttctgggctggcccctgggctgtggctgaactctagctaccaggctgggagaaaacagctttattgtcacccacggatggagtgttacggatcctacttcttcgcctttcatttcttgccactgatataactttttatgctgccagcaatagaaacacaaactggaaatatctcagggcagcggaggtaaaaatagaatgccacagtaaagcggaggcatctccatcacaaatcttgtaaagcaagcctgttggcttttgatctcttcgttctgcaaacccgtgttcaccaaggatcatgcacaggtgaacccatggagaaaaacccaatatctaggattaggttagtaccatgtgtgtctgtctgtctacatgtctgtctgctcctctttctcttgatatgtcctcaacttactataaggataaagctggtggctccctactagctagagactcaagaggccatacttataacacagggagttgtgtgtggtcagggcagtatgtgggaagggaactgaggaacacggtcaggtaagaggtggaaaccttgcatgtctcttaaattttcttaaaactatttctttcttttttaaaatttaaattaaaaactatcttgttttatataacagtccccagttccctctccctcctgtcctaccaagtccccatcccatgagtatttgtctacaggtatgtatgaaaactatgtttgtgtgtgtgtgtgggggggggtaggttgctgggtgtgtgagtgtgtgtgtgtgtgtgtgtgtgtgtgtgtgtgtatgtgtgtgtgtgcactcacactcgcactcacacgctcactggtggaggccagaagaagccatcagaccctggagttacagatggttgtgagccatcatgtaggtggttagaattgaacctgggtcctctgactcagcagtaagtgctcttaaccactgagccatctctcctgctccttcttgattcttctgtcaaaggccacttctgtctttcttttccagactctccatgtctagagctgggggctactgagacctaaaatccaatagtcacatgaagacagttgtttgttcattttgtggtgcctccccaatgccacaagagcttcttggggtagcagcactgtctgcagcttcaacctcttaacactttgacaacttgtgtttgagctttggtaaaatgtactgagacttgagtacgccattgaacagcaagagcaactttgttttttagtggaatgtagacaatttttttgaattacaaacaagattgaattacatgacaatcccagttcccttctccctctcctaccaccctcccaactaaaaccctacctatcccatatcctttcttctaatctacacctgactcgacctttctgaagagcaacttcttaatgtctaggagaaatttcacagaggccttacccgctagtagcatttatataatatataaagacagagtctcttctatctatcactgacctcaatttctctgttctctcagatcagacatgactcagaccaaatgcctttggctataggtccagtgttctctggtcatgattaggttagtggagatgttctgtatttgattatgattattacataatcgcttttctgatccaaaccaacttctcttcccatcacttaggaccatcgaactttagaacaagggccctcagtgattccctcatcctaggatgctagggcaccaacaaggagactcagcaaaaggaaaggcatgagtccaaggtcatatcaaggacagagcctgactggagaggctgtgtttgcgtcctcttatcacgctgactcagcaaaccatctcccttaacaagttttctccttcttcccttgttcggcatgttttagaagtcacattggcttcaaagaaagaaagaaagaaaggagatcattcacaaaggagtgaggactggtcaaacctacaaagacatcctctctgaaaccaaacactggggtgtgggagggtgttcttagctatatagataatgttaaataataatgacaacatgcagaactcaagtcctgctaacattttcatatatgtcctttctagaagggagaacgtttgtcgcctgctgtctgaaatgccacccagataggtggcccacaatctaatcatctgcagtgtttgtcatatggtaacaatgagtttaaagttatttgactaaccagatagtgggtttttgtcagctatagctccatgatgtctgtaatttccaatatatctcatggtggaaaaacagacgaaatctctaagtcattgattgccaccagcacagtttacttacacagatacttaacttgtacaatgtgcagcccatagctggggtagagagaggacatatgcctgtgactaggtgacagtgtgaatgcagcaagacggtcctctatggtttccctctttggacaggctttctcattagaagagtttaatttaatcctggttttcaaaactgaagtctacatcttggtgtggggtcatgataagcaagggaattgtggatataattttaagaatgcaagggactggaggcacaactcagcggttaagagcattggctgttcttcaagactacctgggtttaattcccacaacctacatggtggcccataagcacctataaaaatagttccaagggatccaacatccttttctgcccttcttgggcaccaggcatgcacatggtaatagacatacatacaggcaaaatacacataaaatgtattttttaaagttaaaaatagcagggtatggtgtctcatatctgtaaccccaacacttagggaaactgaggcaagaggagtgccatgagttcaaggcatacatagtgaattccaggcaagcctgatctacagaatcagcatagatcttaaagaagattgaaaaaatatgatttacaagagacaatacattcaggttcacacatcaattcttccataagaagactgaaaaccaagagagagcaactctctcttttaggggttacaataaaatttttccaatatgataaaagtcaatgaagccttcacatagaaccattgctgtaacatttgtttgtttgtttgcttttaaatctataattaaatgcatctcacatgtgctagacatttagtgaggttgctttcaatcctcacccaaatactgtgagaaagtgatcataaccccactttccaggtgcaagtactctgggaaatattttgtgagcacaaccagggcatagctattgagtacagaatctaccatcatatgtagaaatagtttgttcaaaagaacaaatgatgtctttattgcctttgtcatacccatctaccatggaagaaaagttggcctaacttcaagtgaccaagttatgccccaatcatgcaaaactccttttaaaatgtatttaagccagccatggtgtcttatgtcaatcatccaagtacttgggaggctgaggaagatggttgtaggtccaagcccagtatgagttacagagtgacaccaagcaaacaactaaacaaatgaaaaaacttaaaaagtcttttatttattgactgcctattgttaaccagtgaaacatagtatatcaataaattctgtacaaaggaagattagtctcagaaagttagtgacttacataggattatgaaacccaccaaagaccctgatttctagctcaaaaaaaaatatgggaatatattagggtttgaacctaaaatgtttcccttttccatgtggaagggatgatggacattttgaaaagaacaaactaaatgaaggtatgagatgggttggaagtgatttatcttggctatttcccccagagagatgatgggtagataacaccataggatcattgaagggggcatagaggtaacagtaagcaggagccagtgaagatgagcctgcttttaggaagcagaaaagagaggtaccaaacattgttgaaatgtaatccagagaagatgctggtgcagggaaggcaataggcaataggaaaaccctgacttttgctgatgggctgacagctaagtgaacaccagttactgagacaatatctggtggtctgaagaaagaagaaaatagtcagacttggctcaagagcataacccagtacagataagattcagtttttatcagtccataggagaattgtctgcataaagacagtgagttgggtcatcagcctaagcaatctgcattcattagcatggactcatcattctacaaatacttgcctctttttactagtatgcattataagcacgtgccaaggctcttcaaccctgggtaaggggtcagtgtttacttgtgtttcctatgtgatttcaaatgattatgcaaggcctgcatctttctttcattgatcacatttctggacatacatatatttcttggatatttaaacctttaaaaagctacctcaaaaggagtaaacagagttatttatgatgacgataagtgcttggcagaaagaggccagcatgcaattgtatgaaatagctaatctctaaaacccaaattgtcaacaacacatacttagtttgggattatgttttctataatatgattcaaagtatctgcgtattcttcaaaggccaacaatagatttgctgtcatgtccctgctacaattacgtattcatcattttatctgctgatctttgcattcactcctggatccatctacccactcacccctccacccatgaatccattcatctagccttccttactctccttctctcccttctttccctcgttccgccctcctttccaggattatcggataataatataggttctgctataggtaaagaatcagccttgttttatcagttctactttgttacaaacacttttataaatacacatttttatcaaatgaaccaaaatgccattatttcattattttaaaattctaaataaataagaaaatgcttgttttttttctattcactttactagcctaaaaaaatgcacaataattttttagcataaatatacatatgcttattgccatatgtaaagaaattcaattggaaaattaaaatcaggcacactgctaatttagtgccttattatctttgtcatagcatgtgcacacagttacctaataagtaaaatatgtagaacaaggcgaagagccctgccctcaggggatttataatatattctaatgtattctaatggtgtgtgaaatatatatctaaagtcagaatttgtcaaaattttgtaactgggagatgctgataactatgttggagtaggcatttaaaatattcctgccacagaaaaataatatacgtctttatttcatgatgctcatgtcttgtgtttaaaagcttcctcctgctatacaaggaaaacagttaatggccctagaaatatacagaaaatattttcaagaaataccatgggataagccaggcatggcagcaggcagcatatgcctgaaattctagtccttgggaggaggaggaggatcagccagctttggctacatagtgaattttaggtcagcctggctacacaggaagaaaagtagcaacaatggtaaaatatcaagagtcggatgatttaaatagatatgggttttttgtttgtttggttgtttgttgtttgaaaggctctctatttttttattactgggcaaatcattctcccaacttaaacacgaccaagtctccaggttaaaaatgctgaactccatctggtagggtagattgcaatgaccatgattcagtacaacttctcagtcttgccatcgtgtgaatccttaccggcccagcttagttctcctccagtgtcttctcttggagttgtacttgattttgttaccggttttcatccgaatccactgaggaatgggacaattttgcttttgtttcttggccaggaatcgcttgattctcaaagtcttgtgagaagacatggtgagaagccgcctcaggtgcgctatgcgcgatggcggaggaaaggcgaaaaggatcaagaggtttatatacgggcaacattttccttaaatgtgaaaaatttagtatttacttctaaacttgtgttttgaaagctaattggcttaagaatgtaaatttcaggccttgagaggtgtggcacatagtagtgcctttcgttccaggcttagctcacaggacaagatgaccatgagctttctcacagcctctgagggcagcactttatccagaaacaaccgcactgtcaccaattgatgagaacctgtaagggttccagttcagaaatgtcactgcttgtagaagccatgcaggtaccagacaggttgaagaaatacagaatagtgggacctgtgcagagccgaagattggcagccccacagcagtgctcttgaattctcacacagcaattcgtgtgcagcccacatggagccagttaatataagcagaactgcaggattgcaaaggcaatttccagatcttaagtatgaggcgggggtgtggagttccctaaagaacttcttatcatctatccttaagaaattcagcaatttaagaagaagccatgcatagctactcccacaagattcaaaaccactacagcctgggggaaaagcaaaaatcttctggatagatggagcttgacctgtgtccattgtttagagcagaaggcgacataagccatatcctagcattaaggcaccactgatgaaggaccagatttctctccctgacataattgttaagctgttcaagcttattttttttgtaattctcaacattgtagaaaaaaatacttcacttgaaaggtccgtgccatttgccagtggcctcagagaaagttttataaaggagggcggcacagtgagttatttttcactcaccaacatcttttggctttggaactggatttccaaatagctgagtgacctggcctggtgtcaaattacccaaagaacagctaagaaatgtgctgggacaaataaatgtgcagcagcacaccaaagacacttcctctcttccttccttccttctttccttccttccttcctttatcttgctatcttttttaaataagctgatatttgatgttctgggaaaaggactaagaagtaacccttgggagaaaaatcagaactttattttcattagttatcttttagttggctattatgcatatttcctgatagctctggtttatcacggtcatccctttttgtttgtttgttttgtttttcaagacacggtttctctgtgtagccctggctgtcctggaactcactcaggctgaccttgaattcagagacccgcctgcctctgccttccatgtgctgggattaaaagcatgtgcgacaacccttttgatgctcagtaagattactaaggggtttaacctggccccaagctgactacttcgatatctaaattttaggtggaagaatccaactggcaatcagagtgaaacattcaataaagactgggtctggtggcacacacctttaatcccaccacttgggaggcagaggcaggttaatttctatgagttcaatactagcctggtctacaaagtaagttccagtccaggaaaggctacacacagagactgcctcagaaaacaccaaacaaacctaaaacaacgaaaaccaatccaaccaacaaaactcaataaaggaacctcaatcaagaaaagaaaaatcccttaaaatacatatatttttatgtaacattcatagtaaaatgcctgctcactgtgttggtatcaagatctaggagtttaacaattggatgagtttacgaaccagataaagattgacaatgagatttgtgcattttgcacatagatataactaggtttgggtttgaaacttccgttagaaaattcattaaccagttcaagacatctactgttgtcaattctgccaaaagcatagtgaggcacaatttaaatatgaatgcatttaggctggagggatagctcagccataaaggctaggctcacaaccaaatatataagatgaatgcatttgtcctgtaagagtttcattgcttcagagtgggagaaccaagatttgaaccaaaacatatcctttctgatatcaggacagacatagatggcttgcacatttcttttgaaagcttggtgggagtcttctgtcataggcaaccacacaggtgctccatggctccccttgcttgtccctctgagaggcagactgtctgtagagtaacccaagaaagcattccagtccctctgaaggtgataatttacctcacattaggagtctatagccaggccacagtttatctcatgttcaagtgttgtttgtgtcatgcatgtgaagttactgggggctgcatacatggtgtggctggcagttatgaatggcaaaagccatgcgaagtttccctgtggcatttatcatgctgcactctggtcctctcactttatgaatggatgtagactgcttagcctcaaagctgtgtctctccccactgcacacagagaatagaatgcctccctaaagacactgtcatggctaaagccattgtttccaaacaaagcctctgaagtcacacacggaaatatgcgtagaatacattagtgacaagggctataatacagtgtcaaaaggactttctctgactgtctcaactgggtctataggggaacatggagacaattaatgaaggcaaggagaaagagaactatttgttatcttagcttcttattgctgttgcacttgccacttgtactgttaaaaaaaaaaaaagggaaaacagaaataatgctgtcttcaggctttaactgttgtcttcagttttctattaactggatagtatggtgtcccggatctaagacggggtctctccacatcacgtggttgcacaggcccctccctttagttatctccataacctgtgtgtagttgaacactacatctataggggtaacatcttttgtttgtccaataaaccttcaatgtcattgtcatcaaccccttcctatggacttctcttcctacattcctcatatttctgaaacacgtgactctattctcaactactcaaactgatgtcatgaagtctctaaacgaatagggtgatttttttcaagtgtacatgggtgtggtatgcctgcatgtgtgaatatgagttctgtgtgggcacacgtgtgcagatacacaggacacgtgggcgtgcagatggagctaagaggttgatgtcaggtgtcaccctcagttgctcccttgccaaacccagagttcacccatttggttgtgtctggctagccggcttgccccagggaagccctgtgtgtctgctaagagctgtgctataggatagccaccaggcccttttatgtgagttctggggttccagattctggtcccatgcttgagggacacatgctttagccactctctagcttgcaaatggcatttttaaataagcattttttttttatcaatttatcacctatttcttctctcacactgaggctcctgacacacaacaaggcagaagattccatcttgatacttcaattctctccttgattgtgtctgacagaaccagtctgaaaattctttagcagggagctattgttgatcctctatgtaattcttcataatattttgatgttctcattagatgaggggtgagctacttaatgtgtccacacaggtcccctttgtcctgacccaagcccacattcagaccctgctctcatggctgtccccgtcattcttcctaggaacaaacacaccagctgccagcagtagcttccaactcttcaactctctccttcctagaatgtgctgactagtatcagtaaccccaacgtgaatgtgccccaacttatcctaggtctccttacctccagggctgagttaggtacaacccaaggatctccaatagtctccatctgtcccggtactggcaattaaccacatttgcataactacctgttccggtgtctgcacttccttcctggacttcaaactcttaagggtttggatggtgtctcactcatatcaatgctgtgtagtctagcatggccctcactctgctttactatagagtaagcaagcattggatggcagtttctagaagttatagtctattcagatacactatagataccctatagactggcaaggaaaaaccatgctgtgttggttgtaaggaattcctcagcatttgggaggtgagggagtagtccaagacctccaaagaatattacaagatgtgatgaaaagactcagaagacatctcccgcagcagctgaagaagccggtgctgatgcttcagagagtgactgaaaggcagaagctatcaccgtgaccagggctgacggagagcaggggatcacaaacgttcacatcagttgggaaggaagagcatgctctaagaagataaacgacgacttaagaaatcagaagataaaaagggcaccgccacgctgtttttactggaggcttgtctccccagccagtcatctcctcaccttttgaagtttatctatcattgctttgaatttatccttctttctctctggccaggtactactggcatgatcaatgggaagggagataattcacccagggagcttcctattcaggctgtaatcaatggtgacgtattttgtgacagctctgtagaaaggatgactaacataaataaaacgcattgtatattatggaggagtagaatacccagcactgcagatcatctcctccagcagtggggatccaggatttaagaccatgagcaatggcacgctgaggtaaagctaaaattctgcctagcaacttatcctactacccagtggcagcttggcagtccatcacgaggcagtccaacatgaagactgtctccccaggatctcaggaaggctctccacaaacatgcaagatatcataggcagggtccagggtgtcattttagtttttatagcattaatcttgccaaggaggattttctttgcaatgtgttagagaccagtgcaaacaactggtaagaatcacccagtgctatatgaagaaccatgttcctggaatcaggctgatcctggagtttgatcccatctatgaataataatgttctgatgtgagactcaaggacgttaatggtgttgaagtctttaaaatgggattcttgtgtattaatctccacagtcctcccctagcctgccctgtgataaccgcacagacatggagactcattcatgctctgtttccatttcacctacaacgttgtatctactattttgatggctcagaggactgtttccccgaaaagcagcccctccattcaatttgtgtgatgttattactgagtggcacagacatctatcccgcttgttctcccaggctgatgctggcatatgcctatgaccaaaacgggtatccagtcgtcacacctagcagtgcctgaagccagaaactccagccttggctgctttttctttcatggtacttgtctccgcaaattaatcatcagaagaacaataataaggagatctttgagagtcacatggggtagctgttctcagatctgtggaactttaaaacttcatcaaacagagattactgaaggttgtcctaacttggctcttcgagaacagcttttgatatgtgtgtgcagggggctatgccacagtgttcctaggacatgagtgattaaaaaagcagtcatgggaaggtgaagacattcacatggagtacagtgtcctggtgagagctccaaagcacaaatgaaccccgaaagttgtctctatttcagacaaaagagctaggatctgatgcctttctacagaccagtcacaggtgctcagagaaaggatgctcccaggcagggggtcactcctttagaagaattcaaccctagactagtgtccagccttaactgatacatctacaaaacaatccctacccctaaggcctggagatgaagagggcaggtagtgtgtaaaagattataggagccagaagtctgggacacctgctgtaagatagtgtctcctagaaatgatgcagaagctgatccaaggaatctcaatagggagtgaccttaaacaactagcttttctccttacgttcacttctgcagactgaaggtggccgtgcaccactctgtgtgaaagaccaaatgagtgggctcatgaaggtcactgactcccactgcatctccctagcccagcaccgaggcagctgctcctgccatgtcttctacataagctagttaatggatgtgttagggaagagttaaaagacagaaagaagagagatgggcatgctccagaactcagatccacaggcagaaaagaatttgcagcatgagagcccccataaagagactgcggctcacacgccccagccagtgattaaaccttaatacaagttgattgtttaaatttttgtatcactatcactagggtctaccgctcacattgtggattccaagattaagaaatgcaacttttaagacaacagaagtcccatctcagggctgacatctccaaaatggaaaatgcttctgtgtgtaagcattttaagaaggagtagcctgaaactttcctgaaagaaatagttgagatggacactggggacacctgggttggtgaagttcaggtattagtaactgtgaaggatttctcacagaatcctaagtatttggagacgggctaggagttagttaccattaaatccgctaaaaacctaaggtgggtgctagtcacccatcatcttttaagtggccacaggaattgtgcatctgtgatcattaatgtcttcattttgccccagaaaaatttacagtggagacgacctgggacacctgtgctgttaactccaatgttctattgtccattttctttatgttagaacaaaccacacaatggcaatgggactctgcagaagagaaaagagcattcagaggaaagagagacccaccagtgacaagagggagtatggaggtaagtccccagaggcaggcactttctcacacacctcaagtcctccctgggtggtctggaaagcttgagattaggatgttttcaaaaatgaagcatcctcacattacatgcgtgtggctaagtgcctaggctttaagatcaacagtttatcaattttggtcccataccttttatctcagtactaaatttaacaggcaatcaaattttaaagaaaacaacttgcaattccatctaacactgtacaccaagcatttacactctaaacccaagttaatctcagtatcttaccccagatctacccacattgtgggcaatggattcatagacaagaattacatgctactattttaatttctatactgcatccattatttcactcagaaaatatttattaagcttctacgatgcactactttgctcaacattagggagacatcccaggatgggggattcaagaacaataatctcttgccctctgccccaatccttgttggagagtaagaacagagaaatttggcaaacatacttagtttttttttctctgcaagaacatcagtttgttcttaaaaaacagataataaatgctttatttgcaaaaatagctttcttattttccaatgtccagtaagagatcttaccacatgaacacaagctgaacggggttcatcaacaaatcggttaatatttttatttgagggcttctgcactcctattgctaactcaaacacactttcctggttcaaaagagcttaaatcttagtgggctaattcaagcaagtagaaacaagttggtcaacatacatacccccctggagccccagtgcaaaagagaccacctttccatgcacaaatatgccctcttcgtttctgcctccttctgtggcaacctaggaaaaccaagcatgcaagccagtaagacaaacatcaaagaagaatggagcacctgactctagctgatttctgggtgattcttaggaactgttaacatgcagagtaggagacagattgtccaggttcacatttgtgtcctgcacagtgtagatacacaccacgggcaaatgttggcaaatgcaaggtgacatgcctgtgaaaactctgaaggtcatggagtcttactggaggtcacctggccttgccggcaccttggctgaggaaggagggttttgaaaaactcagctctaatcactcttttaaaagctaagtctctctttgcaaattaattatgatctactatttgttaagcttcaaacaaaagaaaggtgcagcttcacatctatttctgttatttgcaatatttgtgtgagagcaaaccagaacagattacaaagaccttggtttttaaacaaaacactcgggctcttaaatataataaggctggtggaattgtcctttaaacacctctggtgtctgggcccagggacagatctgcacttgttactggatgacaaagtaagctactcatggcactgccacttgtgagtaatggcacaattcctgccttcttgggctgttaagtattttctctccgtctctgtctttccctgtatatattaatatctaatttccatgttggttatcaaaatgcaggcaaacagtttctcctattgcacaaggaagatagagggcatttcagaaactccaggggaattcgcacctcaatcatgctctaacattgatttgtgtgaatcaatatgcatttttgcaaacaatcttttagctcctttttttttctaagttagcacttagcagcagaattaggtcattttcattagaacgagcctctgattaactagttctttatttaaaagaatacaagcccagctttcaagaatgttataacattttgtcaatagttcaggatggggctaacgatcatagttaatgaaagcccaatgcacgtttgaaatctctgtggcttctgttatccaactctggatgccagcaaaaacagtttctagtaatcacgttctcccttcatataagtaaaggaagcctgccgaagaaataataggaaatgtgtagttgaaatgcttaagaagcttaacaggcatttcatctggagtgaatttggaggaaataatttttccttctattttctcctctttaagagaattctcttgaggatgaagagaagacacagtggttaggaaggctttctgctcttgtggaagactggggttcagttcccagcacccacatctggcagctcagatccactgtatctccagcttcaagggaccccatgttctcttctggcctccacagacacccaggcataggtgtacacaccacacacacacacacacacacacaccagtaaaaaataaaaacactttttccataaaatctcttacttagatgcctcttgtctgctataaataatatcatgtatagtgctaggaggatgagcataagaaagcaagtgttcacttcagctcaactccactccccaagaatagttaaagggtctgttaaaatcttatggagtgttagaatcttgtggggtgtcactggggtgcgaggaccctttgggaattactgcaggtgattctgatataagttctgctagagactgatattttcttgcattggtggatctcatgtgccaatcatctttaagtgcctcttaatcccattgcataagaatcgtgcatttggcaagagggtgggtctaactgcccaggtccccgaggatgcctgtggaagctacactcttttataggctgcatgatgactaagtcagtgaactcagcattaccaaaatgtccttctcaacaacaagctcccttagaaattgtccagtgttcaccactggcctttaattaaaatgaaaggcttggattatctttaccccacagggaatcgtagtgcctatctctgcctttctacttctattatgtgcttagaaacacatctcctcccacagttgagccactcttaggctcacagtttcacaggctcagataatggctcccatctcttctggtcacaaattcctaacagaagtctgagcctcaggatcctttactgggagcctcatcaacaccgcaattgcgagttgtcaactgccttggaagggacctcccaacacaatgctcatgctgggcacttgccaaagcttcccccggtgatatagttggttttctggtttatagtcactgtcaagcattccccaccactggactgtgcagtgtcttacatttgtctcaacatatcagagttgaagaaaaaagaaaagatagctgaggttccaaataccattctaacttgtattctatcctaactcccttgagtgagtccattgtgacttgggggcgctgggcttgttttactcactgcctcttgcctttgcttcttcatctcttcacagaggatttcctgggctaattgtaatcttattctattagacaagaccattaaaagctgcaccagtagagtcagaggtgggaatagtcccactgtagaacacgggttaagcatgcagagacttggggttcaagcctttgcatttgttctctctatgagtataaagtttccgtcatttcatagcactcccctcgagccccgcccccaacgtagacacaccttacatttgtctcttgccaatgtttagggtttcatcacgacttcacagttttcatctacttccccttgtctcttaaattatcatgactctttccatgaccccagagttaatatcgctcaaaatttttctttttatctagctgtaactctggtttgggattaaagtaagttccttgctaagcccttcattcttttccacagtaaccacacacttggttcacacattaacatgaagctattatgggttggaggtgaagattagctggtcttggtttttgcctaatgcatacaaatcctgggcaaggaggtacacgcttgtaatcctagcactggggaggcagaggcagaagttcaggtccatcctagagtatacactgagcttaaggccatcctgagctacatgagactctgagaaatattgatataatttacttcattggacttcaggagcaaacatccactcttctcaaataattacacatagagtagtagattcaaattttgtgattaaaaagatagttctgaagggcatcgtcgttattgccagtgatagggcaagacagacacatatggacaggtttgtctcagatccataaagtgaagaattagaacacacgtaatcagaccaatggttcagtgaacgcacgtcacttaaaaagacgacttcttggtcccagcttcctctccaagcttttcatcatcaccccatcccccaacaaaaagcttaccagttggtgagtttctgtgttattagttcatggaaatgctactattatttaacattaaaaataaaaatcacactcaagcgagtgctgaattattcatgcactctgattttacataatttggccatccctctctttattgctatttcagtttccatcgctaaacaattctttactaggtccacttcggattcctgtgaacaaggagataacacttgcagaatgttcctctgacgtgatgttctgagctgatgtcccaacatttgcagctaaagcctaaacaactcaaaaaacagctgggaagacccacagtgccctgaatgggaaaaaaatcaagcattaacaaggccattttaatttttttaaaaatcaaatttctttagaatttgaaaatctgtggtgtcacaaaggctaccaaaattgaaccatcagaagaacagccttgaggacttacattgtcacttggtatttccatcacaagtgcacaccaacctaagacatgatttgaaatgcaattaaggcccttagtgtggctcgagcattaaaagtcaccagtgggcactctcagcatctctattgagttcatggcaggtagagggacaggatggcagctagctctttcaggggagtgtcaaatggcacaactgacgtgctactgtggtcagaactccaactacacagcattagggacagttggccctggctggaacttgtgcaggacaaaacttgacaagaattctgccctgtgtgtgtgtgtgtgtgtgtgtgtgtgtgtgtgtgtgtgtgtgtgtgtgtgtgaagcctcagcatctgtaccggagaaagcacaagagacggtgttacaatacatacaaccaggtcaactgctgggaactgcctgcttgagcagaagaagggtgttcttcaaaacaaaaaaacaaacaaacaaaaatcactgtttattgtttcactgtctattgttttgctcatttctaacatataattctttaaagctaatcattaatgtaagtggctagaagtggcaactaagcctttgtggtggcattcttcaaatgtttgctgttaagtgtgagaaagagagggggagagaaaacacagatgggaaatactataatgaaccaacatgttctatttaaaaactgtttgtcagctgtagttaagttgacactgtggtcatagcaacagatcataacattctgcaggttttcctccatgcttgaagcagtcacagcacatgctcgccgggatcacagtggtgggagtttaggaatggcaccatggctggggtggaacagaacatgtgagacccgctgcctcctcaaaggtcagcagcagcacaagtaggccaggtcttcaaatattcctgcaggcaacaagcaatgttcaaggttttaaaaaggggctgtgtgtagcccctcggttctgagagatccccccttgcctgagtgcataattttggattccacttagagactgctgctgtccagggatcaagttctccagtagcttccctctgaggttcatatatgtggaaatgagctaagatgaatgacgttggtagaaggaatctgacctcggaagctagtatcatagagaaaaatggtgaagatgaataaagacaaatcatttgatttcatgaacgtgaagtgacctgctgtgtgtttagctctgggctggcaaatgaggggtaacattaaatgataagggattgtcaagatggcttagaaggtaaacagttagcatgctgccatgctagacaactttcgtttgctctctagagcatccgtggcagaaggagagaaccgacttccacacgttgtcttctgacatacacattcatgttgcggtgtgtatatgcacacattcacgtacatctcccaagcactcataaataaatgcagcaatttttaaagggaaatgtagccacgcctatttaggggctggctatggaactaggagtcaaagaggattctgggaaatgtagtagagaagtgatgacccagacaggaaatgacatagcaaggagactcatatttaagcgaaggagaaacaggaagggcccctttttccattcgcctcctccagcggcaggatgtgagccactggcaaggagggactccaataaggtgtcggataagataagttttataaaatatatagatgtatgataattgagactgagctaacagatgagaatcctagtcattggccaagcagcattgtacctaatacaagtttctgtgtattcattcatttgggcctaactcggacgggcggctggcgaaaagctcacatgtggcaatggggctcagcggcttttggcggaaagatttatcataacaggaaaatgttaaaataattctttgacacgttaagaaagtaacagtaatatttacaccacaagcatgggtcaatttctatggaatccaaacactaaatttagctgatagtaaaaggtgctggctaatccacaagtaagtaacacttctgtctctttaatgcttgtgcatagtgtatcttatcaataatctcaatttcggtctgttttcctagactcgctggataccattaaacagtagaagacgcatcccctaaggtccactggttagaggcctggtgaccagccttgaactacagggaagatgctggaacgtttagggggcggggcttagcagaaggaaggaatgtcattggggtgggcatggaggtgttaggacctggccctttcctgtccttcccctatttcccagtctccatgagaaggtgaagaggcctccttgggcaaggttttctcccatgtggccttgagattctgcaggctgaaaccttcttataagtttgctgtgagtcccactggctactaagctgggagacaccctgcagctggaattcagaacctgtttgctccttttttctgacttacaaggaaagatctccacaataatttaactctcatctcctttccttggccagaatgacctaggccagatgcaaccttagagccacaggttgaaaaattgaaaaaacttagtaatatctggagcagcctgagaaacccagaaaccaatgcctggggctttcatttttttggttcatggcatggcagataaataagcatgattgtttatgttcttttctgttgtttttgttttgttttgaagattagctcttcctatgtagcccaggctagactgaacctcaggatgtagcccaggcttaccttgaaatctcagtcctactgcttcagcctcctaagtgctaccatgtcatgctaatatttatattttttattgcacaccactttggagaatgctcattgctgatgtttttttcctggttcctttgggtcctcctgagagttgatagcatgatgtcatcgcaaagtcactcagctcacttgccctcttttcatctgttaaacagtcatcatcattgttgactattttggacctaatagaatatggacatgaaccagtccataaaatgcaagttataatctttcttagaaatacaaagagcaaaaattcctttcggttggagggatcagagcagaccaatgaaaataattttaaatgagttttaatagtgtttgaggaagattttaccttgcagagatgatggagaaaaagcatggtgccaaataaaaaaaaatgtatacaattcctacaggtcactcattcccagtattttcttggagtgacagaatatagcatcttactctactctgttctctggctattcaagatgcctgttgaatgaactcataaacgtgagtaccagagaggtttctggaatccagtgtctgcacttaacaaaggtgcaaatggcagtctggggtactggtgactttcctgtaatgagctccttctccctgttcctttgttgcaaggttccctccaatactgtattagggttggtctctataaacaaaagaatacttcagaggtagtcatacttcacttccaggattaggtcataaaacgtgttgctgttcctactctggcacacccctcccttctctctctctctctctctctctctctctctctctctctctctctctcctgcctcctctctcctctctcatcacttgttcctgtacagagggaggtgagatgccgtgttaccaggaaccatatggacaggtctgaggtctccatctaacagcccaggaaagggatcttgggagcaggcctccttgcactgtgggaacttcaggtgtctgctgtcagtaacttaggagaaatttcagccagagcaactactcagcctgaccacacacagccacctgtcttgactcctggacactgtaagatttggagcattgcttattttaagctaatgaattttaaagtaagttattatgttgtctaacgctgatgacaaggtacttcatgggtctctttttcgattttgtttttcttctcccatttagggaacttgaagatagaagctatgtcatatttgcctctaggatgagcagaatggctgaggccaacagcagatccaataccattttctgaatgaatgaccatctccttcctgtttgtaatcattaaagtaaattcaatgacaattacacttccagacttctggcttaactaaggcattttaaaaaaattaatgtggtttaactcagaatgtggaaaaggaaaaaaaaatctagaatgagatcacctttctgaaagtccaatttttttaatgctctcaccattaagagttcagtataaatttgcaatgaggttcagtggacgctttagggcagcttggcctcctgccttttaagcattcatgattgcaaactgaaacttggcccaggagctaagacatgacagcatgatgggaaagggtgacgtaagtgtggaagaaataaactcccacaggtcttgggtttaggggacagtagaatctgcaataataggacttgggggatatacacctaaagctaagcacccttgggtaacttactgttatcacttaaaccaggtgagacatacttatttctcaaatatctaacagctcttatgcttgaagcatttaaacacctttctttcagcttccttcctagttttcaggatttgttttatttctaattgtgaatctgtgtgtgtgctccttcacatgagtggccatggaggccaggagggagctggttatgagtggctgtgagatgcctgacgtgcacgctgggaaggaaactcgggtcttctgaaggagtggtgctgagttacccccagcttggtcttccagctttcaggaagtgtgcagcacatcacagatatctacagtcaccacactatgccacaacacatcagttttttcctctctaactataacttgggcctacccagctactttccccaatcctccctccctccacatacccagtctgttaccatggttctactcttagtgtctatgacatcaccttttctgtatttcacatatgagtgagatcatgtggaacttgtccttttgtgcctggcttcagagaatcagggaccaaacaccttctgagcctctacaggtgggaattacattctgtagttaatgatagcaactttgtagtgtactcctccttctgaatccaccagccgcagtaacctgatgcactcccaaaggggaaacacagtacataggctgttaaaataatctcattaccatgtatggggagttgccatagggatgcgtttcttgaagctggcatttaccaacattgccatatttctattttcttatcactaaactcgtttttgagactgatctccctgaggggagagttagtgatgctacacaggaggaagcagagaagcagtggccctgctcagcaccaactttcaccaaaggatagttaaagttcatgaacgaaggaaacagccattgccaggagagagcttccctacagtgtacgagctctgatgtaagggaccctgagcacctgggcaatctcagcttttcctactcagggaaagaaactctgtcttctctccctaacctgtagccaaagatacctggatacagttcaagaagatgcctcaagacagcaagacagaatcatctctccctctgactgattaattttttgtcaactcgacacaaactagagtggtctggaagagagaacctcagttgaggaactgttcagagcagattggcctacagacatgtctgtgggggaattatttgatcattgctgtaggagagccccacccattgtaagcggggctactcctgggcaggtggtcttgattgcaaggaagcaacacgcctctggtgtccccctatggcccctgtggcctctgacttagtttctgcatccaggtttgttcctgccctcagttcctgccacactttccctgtgatgggtattactgagatgtataagaggacataaatccttcctcctgaagttgtttttggtcagtattttatcatagcaacagaaagaaaactaggacagagattagaagagaagaacaaaatgcagtggtacaagaaaggccttgggttaagttgaatccccttccagagagacagcctgactcctgtacaagttggcaagacatcttgcctcttgaagatttgagttctaccctaaatgcaaaaggcaatatatttaatatgctaaacctcgaactaatcctttcctaactctcttctcccaggcttgaggtctgactctaggaccagctcttctacaatttctaactcttaaacccagcctctcagttgattcccttaatggctttaatttcccagttgcccacacacaaaacctcaacactactctttaaaatattttctgtggtgactgctcagtctaagtgtaaccccacacagcctaggatgaccttgaatgtgccatataggccattttgattttgctctcaaaatgttgatcttcctgcctcagcctcctgaatgctgggtcacaggtatttgctaccatgcacagttggctaaaactgatttctgagtcactgtagacttacagaaaagttgaaaatataatagctttcccattggtccatgctgtatctctcctatggtaaatggtgacacattgtctagacttcaggttttattcatattgctttaacttggacccactgccttctccctgtcccaggaccccatctcaaataccacatcccattgacctgccatgaattccccaggtcccctttgtgttgggtgtcttcaaacctgagaagatggacctatgttctatggattcctcagtggagaacttttcctggctgatggttagatcaactttataagtttggagagggtgaccacagaggcagggtgaatcttcacatcagcatggtgcgtcatggatgatgcttctagtgtctccactcccaaccccctgtaactgtgtgtgataaacatctccactgtgcagtggagagttgcctttgctccagactcacactgatcctctaaatatgcagaacactcacacttcaaataggagttaaacctcaagattcccaactctcaactggaccaagagaggtaatatgataactgctggtgcctcagatctccttctctctcttcctccatccacacattccttctaagaatactcattgtctgatgtgtgtcaggtactgtaccagccttaaaaacacaactttacttcaaataggcaaatgacctgaagattgacaagcttacaagggtggcatccagttttgctagggagtcaaagcagagctccccagaaaggtctccactcttgcctcttgttcttgtttagttttgcgttctagggactgattctaaggctttgtgtgtgctaggtaagtgttctactactcagaaacacagcttccacaaccgatgtgactcccaaggacataggggtcactgtcactatcatcatcattatgactgtgcatcacagagaattttaaagcattaagaaagaatggatcaggttggggatatggcccactcaataaagtgcttgtcttgcaagcatgaagactctagtttgatcccaagaacctacacaaaaaggcaagtatgctggtgtgcatgtgtgacccccaactataacaaaacaaacagccaggtcacagggacttactgactggctagtctacccagtctagtcagccccaggtcccaggaagaaactgtgtctcaaaaactaaagtagatgtctcctgaggaccacatagtgtcctctgatttccacatatgtattcacacatgtacctaaacacacatgcacatccacttgaacacacacacacacacacacacacacacacacacacacgtctctacaacaaagaatataatcacatagtcacatcctctgagaccttgatcctttcccaggccccagggctaatccataccctgtaagactgaacataagattataggagtcgtgaatgaagtgtcagttcagtcctggcaaggatctaaggaaagggaatgaggaacatggaatgtcagaaaacagccagggacagtgggagttgcctgtcagttgaaactctttcaatcacaacccaaagaacaaaactttgcttcaaccaatacctggcacaacacactcaacataacacacagactagcaccaaaacagaagtgtttcaggaacttccttcaacaggatgaatttatccataactgctacaaatgtttcatttttgataatttggtattataatatatgtagagccctagatccatgtccaggtccctgggtatccactggagattggtgtcaggactactaaagatatagaagtctgaagtcctttatatgcaaccctcctttgtatttccaacgatctgtgggttacacagaatacataatagactatgccacagaatagaatgtcatgcactgtcatcattctctgttgcagatggactgagacgtgggggatttctgtaccttttcaggacagacatgctttttctgagtgtttggaaactgcagtgatttaaaccattggatgtgacatctgaacacagatttcttgagaagaggctatccccttccaaaccctcccatttgtataagtgggaatattttaaatcaggggagagaggaggcaggcttcagcatatcaaatgaaaaggaactaaagaaggaaagccgctgaaaagaaaggtcgaccagatgttccgtggtaaatgagctaacattacaggtaaatgcaaatgaaaacaaacaaacaaaacaacaaacaaacaaaaatccagatagttccaccaacatttaccaccttgaaaccattcagggaagccattaacatctggcccccacacgccaagcccatcaccaatgaatgtagtaaaatcattccaggctatcactcagtgcagggcacatgctggctctccccgcagcactttcctggtacacaactacacactcaagttttgaccaggccaccagaacacaggagagacaaggaagatgaaaacacaggtaactcttaaaagtgagaaaaagacttcagccaacacttgagatgatttagaagctcatctccagatacacagatgacaaaaggcatctgttaaaaggcatgaaagtgtcctctcaataataagtcattagaaacagtgttccgttttaagaagagagaagcataatctgcttggcttgaaacaccaaagcaagggtctttaatcactcttgggcccaaggctcctttcagaacctggtggaagctggtggtctccctggcaggtaagtgcctgtactcagggactcagcactaactacattgcagcccctgcatgccagtcctcacctcttgtgctatgtgggttctcttttcttgggagcccctgtgttaaaagcttatacatccacgagctttgctaagccctctgctaaagaaacatgctttaggggcttgaaagaagaattgaacagttttaagtgtaacaaatcagtcaggaaagagagcttcatttcacttactctgtgacgaacaagttaattttgtatcaatccctaggtttctttttaatttcccaattctcatttcattgggaaaatcacaacatgaaatctagcaccttttttttttttttttgtcatggagactggagaacaaactcaagccttgtcacgtgctagcgagggttctaccactgagccacacacactccaacccaagactatgaactaaagtggacaagatggcattagtaactaaaagcgtgtcttattggcaccttcttattttccctctaccttgctgggtaccaccatctgctactcctgttcccatgcatggtatgatttcacattcctcaggaaactggaaccatgcagaagtaactctgcttccactcagcactctgtcaccaaggttcacccatgtcttcatgcaagtgtatggcttctgccattaaagggtgactaatattccatgctgtgaacaccacattttctttttctgctcctccttgaatgggcatttaggttatgttcctatcttgaggattatcaagagagctgtgatgagcacagaagtgctaacaccagtttgggaattttttttaaacctttggataaatccccagaagtatgactggcccggtcatatgagacttctactcataattttttctgttttaaattttatttacttattgtatattggtgtttctggattctctggaacaacagccaggtccttttaaccaccaagcctttgcttaacttttaaaattacgttatttcttgtttttcatttctgacttaggattcagggcctcacacatgatcagactctatacgaagaatcacagctccagcccaacttgcccattcctcatatttaggggccaaattccttcctctaagaccagtttatttttttttccatctagttcccccatctcatacatctgagttaccctcttactcaaacatactccacacaaggaaatcagaaataatttgtaaaatgaagagaccaaaatgagtgactgcttctcttcccagtcctggacctcagtttgttcttctccttgggttagggtcctctgaatagtgacaatatgtcagaatggtggagtgtcaaaggcttgaaaaataccaagtatttctctttaaaatgtttgctactcaacaaatggtgagacatccaaagggtacatagcaagatgatggggaaagccctccactgtgctttcttcttgggaaagtggggaatgggcactggaggcagcaagaaagagcaacattcatcttcccagggactgaagcttggtgaagggaagactaagaattagggtgtccttggagcacaatgtggtatccgtgtgtgtgtgtgtgtgtgtgtgtgtgtgtgtgtgtgtgtgtgtaagagagagagagagagagagagagagagagagagagagagagagagactaagcagctactatgtctgatactgccattgttagcttaagatgcacaaggcaaatttagtttgaaaacaacaacaataggaacacgtgaacaaaaatgtctgtacttaaaagcagttacataattcatgggctgaatacattataaaaatgtagggccttctacatacagcattcacccctatggaccagtgtgcagggtactggaagttatctgcactctaccaaatgagaaaggtaaacatcaacacagctacaaaaatagatctaaaatgatgacccacctgccagaattgctagtgaaatagtggcaaaatgactgtggagtaactaaccaatatctgattggatttaaggtccattccatgagatggactccatctccagcactgcttggatagccaagaatctgaaaccagataggacagggacctaagagaaaaccaaacactactgccctgctaacgcaatgtaaccacaaaatgcttcctaatgatattctgctatagtcttagataaatgtcttgatcagccatcatcagagaagccgaggcaagaggtttgccattagtttaagatctggaaaacatggtaagatttaggccactagcccctagtgttggaagctgacaaaataaagaagacaaacagtgaaatccctggagtatgaaggaccacaggtcagcatcctagccaactccctacaagtcctttgtgcatggccttgggtggggatgtggggagcacgttggggaagccaaaggctggtcctctcagaactattttcaacacaggtacaaagagaaattctctcattcttatgaaagattatgcaggagaatggaatctactttgtttaaaattgttattcgattgccaggctctacagtgacacttgatgtttcctacaaaggctcagcatgagtgtctaggttctttccagtccttctcacaaccctaacacaacctctcctccactccattatcaaatgaggttagataaggaatctctggccctcagtgagatctacatttcccatttacaaagtaaaacagctgtggtaacaaataagtatcaacttggtagcaataaccattgagtctagatatttaataaaactacaaaataattttgtgaaaaattttaacctgtttgcacatcactcctccaatgttttgcagggggatgggttgacagagtaccctgggctccagcttaccctccaccccctattgtcagctgtatacttacaagcctgtatctttgatcagtatgggattaatagccctgccaaccatacccatttaaacaccttttctacattctgtcttttttttttttgtaccctggctgttctcctcagcagaaattaccctctgtcagaatttacttattatgcccaagtctgttaactgtattccatagtgtcttgttgggggatctattattaagtggaaagaaagcagaacagagccagtctgaattaaataaacaaatggccagaaagattcaaccctaattaataatctgtcagtccttcttacctcctacccaactaccaatttcacagtcagaattttaagaaaaaaatagcattcaagtcccccccaacacacacacacaccaaacaactggtcctttccccttgttactgagcaatggatctgaattcaaatactgagaattattttgttagttcttgacaatttaatttattaattaatctagtccctccactctgtgtggctagatatgtctcctcagtatctcagatggagcatggagcagcctaaagaccaaacttgccagagactgacactaaacctaacttagaatgattttctctgcccagagtgggccttggctgtacaagaggcagggtccacagaataacaaggggaagaatcctaacaacacagcttccagcttgtgctgaggctaagggaacccaccctgggtctgcattttaaggggtttcagtcttgacacacccccttgtcacttatttgccttctaaataaaccctgggtttttctaggaaaatcagcacattagcacacttaaatcagacatccttgtaccatttaaaagggctatagaagatttattaacttgtaggagcaatcatttcattgctggttgctataacacacacacacacacacacacacacacacacacacacacacacacacacaccccttcaaaatgagcaaattaaatctgctgcatgcatttgcgctttcaagttcttgcagagcctgttcctttgaggggtgataaaaagtggctgggaaacacagtcctttggtgtagatgtctataggccaccctttcccccgtccctgccttcatgtgcagaagccagtcattctctacgtgcctcatatttgtttcctaagccaggttcccaattcccctctccaactccgaagaaagcccaacaagcatttgcacagagcaaggcactgtactcacaattctggggtgtgtaaagccgctgtgtgtctaatgggaaaactgcttagtttactgttgctttccttcctgttcaaagcaacagcggcctctcagtgcagctgaggaaactggagaggagacagtccttcccaatccacgcactgacgtgtgaactccatttcccaggaatggtgcttccttagagcacagtcggttgtttgaaacttgtctctggactcaaagtcaaaccgagagccatcaagagaacagagcatctaaactcactgaacttggtgacgggtgagtgtggagccagacatgtagagtcatttcccactttacaggtaaaatgctgaagacatgggttgaagcattgatacacacccaccagaccctgcttcaccaagaccagcagttagcaaagaaggttctgagcccagtggataactagaccacataagagcctcatagccagattgtctgttcttggttttttgttttttgttttttttttttttaaagtgctggatgattcttccttggacaagacctctgttccattgcatcagacacccagtaacaggatatcatcaaccacagtgagcctcagaagcgcgggcaggtcacaagtgaaatgctcttggctgccaattgagattgacatgtgctgttgtcgggaacatcacgctgtccaatttggccaaattggcaggctcgggactaatccgaggtacgcactgtcaaacggagaactcaggaatgagccgctctctgtcatgacaggcagctctgtctctgtggattaaaacactccacttttgtaattggaaatttaaaaaaggaattttatttttaggcatttggttttgtttggactctgttttgtggtagactttttttttaagcatttatgtcctgaatactaccaagatccccaagtgggacatctccagttgggactcgaaagcacataagatgggaaggaaagggggtcctagaagaccttaaccagaggtggctaggcaatagcttctcttcggggccatccttctgctcctctgtgggtcatggaaacctgggcgctctaattgaaagcctgtgtattccgcagaacacaccataccactgttaagcccagcctcctgcaagactgcctcctaacagctctgttctctgtctgcctttaggatgtgcaggcaagtggaaccgttgctcgcactgcatgctaaaggccgcagcctttgtcttctccaagttctgtctatttcagaggctaacatgcagcaattagtctaattaatatgaaacaatgagctgtgttaccacttatcaaattgattgttcccctatcaaaacaaaacaggctggctttttgatgtaatttcaagagatgatttgaaatgtcatgttactgcaagccaattacggtatgactggagtcacggtcaacagaatacataattagcatgagtttgggaagggctgcttaccactggtatgttaattaactctcttttgtcataaaacaaaaaggttgcaggggaggatttgaaataggtgttttttatttacttttctttgtgcttatcaattcaaggcatgacagtgcagaagaattgtaattccactacttcaagttaacactcagccacaaggtcactggcgatgtccagactgcagggccagccatccacctcactctcatcctgcccccatgtgtgatattgctcagggagtgaaatggagtactggacaaaactccagtgcaagaaacaccaggctcctcgagataaagctctcttctcggggaaacttgcaaggcccgggcagcactctgttgtcgtgggaagtgcatccaggttagggttctgtcgtagtcttgtaaattggggagaggaaacccatcattggacgatgccacagtctttagctccctggggtattgagggaatgaatgctggccagctaccatgtggccttgaacagaaatcctatctgcaaggccagggctctgtggggactcttggtcataacagcagggtaagttccatactcttgatgaaggagccagttctgtgtgtttcttgaactgaaatgccttctgagatacctctaatcagtaacagaatattgagaatcaacttcatagcagccttgagatattgatttccctgcatgtgtcagtacagcagtgactggcttggagagcaggttggaagcttctagcattctctgcttacctttccttgtctgataaacaagtaggtgggaggttccttcaggcactccacactttcctatgagaaatccatagattattttgcttaggaatccccctcttccacttttctgagggatggctatggtttggtttcacagtcatattggagtagtccccagcagtcagaaagggggctttctgacatgactcaacaggcaaagtacatctgcacaaacctaacagcatgtgctcaatccccggaacccccaccaaggtagaagaagaaaactgactccacaaaaagttgttctctgacccaaactcacacaccatacacacacagtaagagtatgtattttaaagaggctcaaaagtatagcattatgccattagaagacaatcaagtttagactacaaattggattagttttgcttccattcatcaacatagatttttttctgtcccctaggtatattaatgaaaatattaatattaatgagagagatggaatgtgcttttttttttttttcaaaggatgagtgtctggccatgtgtagaagaaaatagccagggtctgcaaactatcctctgacttccacttatatgtcccacacacactaactaaatgctcagaaaagaggtttgcctcattaagtttaaccatcagttagtgccaggtatatcatggttcaattacagtcaaaggctaagtatattaaccagttagataacaaaagaagtgatagtagatgcctaattaagaatcaaaggttcacaagactctaagttggctaagatgtcaaacaggtgcttacccaacgcctatctcccaatatggcactcttggtacaccaggtcttgaaatggagctccattctgtggaaatgtctctttagtagaagtaagggagacagccaaatgcgtttcatgagtgtttggatctgtactaaagcacggatcgtagcttgagaggctttgaagacgaaccttagatttttaagtcaggagtcttatggcatcagggttaggaacaattctttctaattcattttctcctggaccaggtcctaatctcaccattggtttgcaaagcatcagaaagaacatttagtcatgtttgttttctctctgtgtgtgtgcgtgtatgtgtttgtgtgtgtgtgtgtgtgtgtatgtgttgtggtgtgtgcacatgcatgtatctgtgtctgtgggggctagagggcaagctcaagtactatcttatggaaatgtcatcaatctccttggagaccacagctcatggatagataggctgactagagagccccaggaatcctctgtctccagctcttaacacctgggttacagtgcaagctaccatgttgggatgtttgtatgacttctgtggctcacactcaagtccccaaagcaggtgctgcaccaacttatccatcttgccagcacccaaatttaagtttcatatcatacaattctaccacaggattttgtcttagtagttttcttctctaaggggggaggaagtaagttagaaagggagataggagaagaaggaatggttgagtgttttttgttgttgtttttgtttttttgttttttgtttttttttttttttttttttttgctgccaggcattgaacaggttcccacggagtcacatacataactactaggggttaggctaaatttatatgttaccttactatgtttttcatcaaccctcaaacagcagatactgttttcccacctacctcttcatactaatgttagccagttaacaagacttagaagcagtaatcaaaccaaagctgggcaactaactttgactcttgaatcccatttctgtagctatacatgataatttatactttgcttttttgttgtattaaaatcttgaacaaggatttggctgcattgttacagtaaaagaaaaacacatgaagttatcaagagagagagagagggagagagagagagagagagagagagagagagagagagagagagagaagagagagagagagagagcgaagaagaggaggaggaggggaggaggaggaagagaaggaggaggaggaggagaagaggaagaagaagaagaagaagaagaagaagaagaagaagaagaagaagaagaagaagaagaagaagaagaacctatagtcataactatttccagtctacaaagcatccagatgactgatgtctctatcatttgaaattttgtatgagggagataaatggaataccacatcactaatacagtttaatgccaaatccaaaacccttttcaagcaaagctgggtgtttagaactcagggcagctagtcttctttcaaacttgaaacccctcagaaatggtttcttttggtttcaagcaaaaccaaaagaacacattctttgcagaacacattctgcaaaagaaaggtgttgaacgaaatagctatgccaactgtccatctaagcaggtgcataccatcgaagcctgcagacagaatgtccagaagggccagaggcagcagcattgagcagcagggagcaacagtccccacagacattctggtaaaatgtcagttggattctcagcttgcctccaccaccttccacaaaggtgaacatctctttaagtgggaacaaactgggacaagtctgttttctttgacttcactgtgatgagcacaggccaggaggaagaaagagatggaagcaggtaggaagagaaacaggtagctcacatgaaagcacagtgaccttgctatgggcctgaagcttttactgaaagtcatgtcggtgagagaaaagtggaaacagcacacagcagagccacgccatcaaatctcctctcccagacttgcagaagacacttctctgcaaggcagaaatatccttcccttctttctgtccacctctggcccatgctcttatagcttaaggctcaagagaaggtaaaatcccagaaaaagtctagctggagtaagggacaccagtgcacaaggggaagaaacagtcttagagacgagggctgcaaagccttaagtgcagttgatcaaaacaacgggttgtggaatgtgcttgtcagcagcagaggaaggaagactcatggccacgtgtttgtgcagatgcttgtacctgtgttcctctatgacagaagtatgctacgtgttttatatataaaatctgtcttcctaagcattactgtttggaaaataaaagccaatcacattcatccttcttatgggattgcacaattagctcataaatctctccttcaagttgtagccccagtccaaagactccaacaaaatggacatgacatatagattatgcaggatgcctttatgtgtgcacatgcatcttttagtgtcctcagggaataaaatcaagggaatctcaggttccctatgtaaaacatcatatttgtctataatcatgtataccctactatccactccaaacagatattctttaaatagaaagccaactatgtgacgggtatagctctttggttcagcacctgtccttagctgtgttgtccaggggctaatgaaaggggggaaatctctacatatgttctggatagacataattttttcaaatgttttctatttctggttgcttgagttgtgatgtccatggatacagagtgctgtagtgtgtgtgtgtgtgtgtgtgtgtgtgtgtgtgtgtgtgtgtgtgtgtgagagagagagagagagagagagagagagagagaaagaaagaaagaaaatatatatgtgtgtatgtatgtattgtatatgtatatatatgtgtgtatacaaatatataaatgtataggtatgtaaaaaatagcactattttccaaaaagcaaggtttgaaaaaaggcaaataaaatataaccaaggaaagttaaataccacccttttatgcacacccctgaattaaacatgtgaataccataggctttttctggagggtcacacacacaagtaagaaaatgaagagaataaagaaataagaaaatgagacactggattacagggctgggggaacaagagagaaccttgtatctaccaagatttctcttttaaatcggaggcgatggttactcttgagaaatgtttggtgtggaagaaggtgggacctatcaaataaaatgagataatataaatatttcatttagtcactatcatctctttatgatgatgaaaagacattattatcatattttttatcctaattcgtaaaatggccaaccttccacattggtaatgggtgacagcacacgaatcttagtttgacacaaagctcagacaaaccactcggtattttcaatataattgtaatggcttctagatttaaagaaaaataataaagcaaaaaaaaaaaaacttagttaactctgacctgccctattggtcacttacaaatatctatgcatcgaaaaaaataaactttctgcatattcattatgaagaggatggctgataatcagaaggagagattacaaatttcttcttgaggattagtctctgattggttgaatttcaacatcagctgggcaattttaccattaagtcagcagaagtgagttcttacatgctacgccactttactagcagagaacaccagacagagggaaaagaacacgctagaataaattgtgcattatttctggcattagttaaaggaactgagcattataagaaaaaaaaatacagtaccattgatttttacaggtgtttaatacagataagctgaaaaaagggtttccattttaagcccagcgatggctaaagatgcattcaaatatgttcaaaagcaatctaaagtcttctaaaatggtgtttaagctattcaggcaaaatgtaaatagtttttgtcgtagtcccgggaaatatagaacaaaagctgggcccggggtgctggctctggcacactgcaggccactgtcaaagaaggggtcattaaaatggagactacactgtttatctgccgcctgatcacagattatttagtaaaaacattaccagactgtccttaggaaggtagacagagtaattacccaacactgctctcaagaggggacatccctgcctgcctgaaacaatcctgctaaggagtcaagtttatgcttgagaaaggtgctacacaaagaactgaaatccagtattttaaccttcaactggcttctttaaagaaaaaaagaatgggatttttttttaaaaaaacaacactgaatcaatgtcattacatgtttcctaaaggtccagtagaaaacagaaatgtcacggagcgctgggacataccagtgtggaagagcatgcattggctatgacccaatgtgtttaaagttggagtcaaagaaatgagtaagatgagtcaccagatggagagcttctcttctgtcctattatgggccaggggagccgtccctcagcttttgtgggatcactgatcgggcagtcgactggataatacacacagtcaagaaagcaagggtcttttaccacagaggctgagtatccacagatgtgaggaagaagagccgttccttcccctttgtggccttcttcactacacactactctgtcttctgcaatgtcactttccacccttagaaattatctgtgataactctagctcagacataatcatcaaaccccacagttcccatctcacgaacacctcttgcttcctttgctgtggggggaacctagtgtttctgacctattgaacaagggctccaccacccagctccagcccagccctctcctggaacgtggtcttcccaccagctctcttctgtgacattgtttggacattgtcctctctctcccatctctcatgtgaactcattcttactactgccacagcaggtacatgtacacaaacaggagggatcacaattaggccaagcctctctagcctattccaacaagcatcaagtgcccattacctatgctgaagagtttcaaggcaaggactgataacaatggaggtagaaaggactccatgtgtgaaaacatcacctttatcgtaagcactaggacaattacagaacatcatgccaacttagacaaaatgctcaacacagcggctcaccacagtgagctataagcaagcagagtaaccagaggggagctgcaagactttgtggtagacagccagtcactaaaggatcccgtgagtggtggtaagtgactcacacattggagatgccatgacaggaatcccatgactcagacagatttgcctgctgaacacatgacatggccagccaaggctaagaacatctgaacaacagccatgccaggccttctgaatcacacttcaggacacaaagtggctcagctgtgagtgtatctgaattttcatctgtaagagacctccagatgccttgcctctcaaagaactgtaaagaaagttctgcagaaccagtaaattagtaacagtttagaatttagctacatttgtaattttacaggccagggaaatgagctccacctcaggagaggtgaaaattcatattacataattagaattaataatgatttttattctgacatagattggggcattggttcataggatataagttttgaagcctaataatcgaggtttaacttcttaccttgccaatactgaacaggcatttggccagtcatttgactgcacccaccttgaggtagcctgtctgtaaaaggggaaactagtgaatcctgcccctcctgtgcctgttagagacatgagaccctcaggcaggtggagatggcatcacagctttacactttagttttagatgcaatgtgcctggtctagagggggaattatttggtaaagtcactttaacttgtgtgtgtgtgtgtgtgtgtgtgtgtgtgtgtgtgtgtgtgtgtgtgtgtgttcacattaacacagcacacatgtgtggtcatatactcaagcacatatgtagagtcggagatggatgtgaggtgtctccctcagtcactgtcaaaggagcagtttagtccaagtattccctagctctaccctcacatgctaggactacaggcaggcaggcctccatcctccataagcatatatgtggactgttagctcctcacaggcaggcagcacacacttttacctgctggcccagctccccagcttccacactcatgtgcttgggaaagtcctcccatggctcctctgagtttcaagaataggtctcccttgcattcgccggtgtttattaatgtgttctgaacctctgccgtggcatctgattcacaataaagagattacgcatactaatttgtcatttattttccaatgcctgctttcctgcccgaagcaccactaatatcccaggagcacctcaacccaattacttcccattttgcattactgctggaagtcgtgctaatgtgcccaaaggctttgcgtatgtgtggcatgcacacacacacacacacacacacacacacacacacacacacacacacacacagaggcacacacacatacacacaggcacccacacacacacacaggcacacacacacatgcacacaaaggcatgcacacacacacacacacacacacacacacacacacacacacacagagagagagagagaacacctgatttacccacaacactgctatcgcctgctgtaaaaccacaccccacacacctctggaccactgagccatatctagcaatcaaccaaattaacagcctggctgagccgtggacaagaacagccaaactatgcttatttagtatttattttggggaatggggagtgattccatctgcagactcaagttcagactgcagagggagttgaagaatgtcatgcctacatatacaaattgttttgtttgcttgttgggagcactgtgtgtgtaaaatgttcaataactgaaaaaaatcaacttatttttcctcaaacaactgataactggttatttagacaaatctaaatattaacttgtgaattaatttattagtgttgattctacacattatttatatacaattgcacattgcctgtgagttttgatattgcctgatatgtagacttcaaccttcctgggtaatgctttgctacttgcttccatctttcacctttaaagcatgtttgttacttactctggaagtttctgcatcacttaaggcagaggactgcagaggggccctcaccaccatgaataggaaacattttccttccacacaccactccccaccccacccaagctcaaagttcatttaaatgtctacagagcaccaagcataatcatatttttaaaacttcccaatatcaccaagcacacacaacttggatttgaaaaatccaataatgttggctatgctgacagattgttatgtatttcagatacaatcactgtcaaggatgagatctagcaccgttaggctgatctgggtgaggctgtatgagagctgcaggcgctgacctcagagcctgaaaggattccctgtttaatcctttggaggacattttttatcatcattctgctttcccaaactagggagtaaggcacagagaagtgagtgattgtcctgaggtcacacagctgggagctgactgcccagcctgagctttaacccaaatcataccatcttctacacaggcttcacaattcagtattttccagtagggccttgaagaaactgaagacaatacacttgtaacccagaaaacatccagaagaccagctcagatttttcccctctcctctcagggtctgtgccacctgccttgggaacaggaccacccagctcaacctccccagcccctcccaggcccacatggtcacctccacatgctgtggtagcaacagagcagagctttctctgccaaagcaacctgagactttggagctgggttcagcacagctggtgcagggaggctcagatttccgctgaactgatcacaatggagagaggctgtcacagggccacaggaaggcacatgctccctcccggctgaatttttgtagcctaagtgtgcagactatttaaaactttcccttccacctctgaaatgccttcttaggggcaaagttcatctgggggggtggggggtttgtgggccatatgctgtttggtttccctgtgtgtttgtttggtttttgcttattttggagcagacacacagaaaccagttttcaaagagaaacatggaaaatgtccacgattactgactgcgtacatggaatgccacaatcacagaggatcaaaaaggaacactacagcaattccgctccgacaaaaagcaaactcgagcttgaccaacacagatagttttttttggggggtgctctttcatgattcatcttagctcatcagagtaatctgtccaaacagtggctgggagatagctgtccaccaagtgtttgccacacaagtttgaggacctgagttggattcccagagctcaagagtaaaaaaaaaaaaaaaaagctggacatgttagagttagagcatacttaaaatgccagtgctggggaggcagagacacagagagtcctggggctcactagccagccagcctgcataacctcatcagtgagttcccaggcaaatgaaaatgtctgtcaaatggtaacatgtggactgcatgaagaaaaaagccaggggttgacttttgaatgatatatacatgcttgtattcacaggaacacatactaggtacatgcagacacacacacacacacacacacatacacacacacacacacacacacacacacacacacacacacacacaggatcagggtctaaaatgcacccctcctccatgtatagaagaagcatgactttaaaattctgtacattcaaggtcgttcattcagtaggctggccatttagtagcggctttgcttctaattgtagacttaataagagatattggggcggaatggaggatgtatatggggatatttctgctaattagcttaatcatttcatagtgcatccctattttcaaaataacatgcagcacatgatagatacttataatttttatttgttaactggaaaaaaggggggcgggtgtcaatcttcaccaatcagaacctggcctgttcgatgaatggtaaaataatggcttttgtgtttaagtttaaaaacaagtaagcaataaaccagaatgaaccttacttagagtaagactttcagaatttggctgccaatggcaacacacctaaatgccagacttctgccctgagacttatagatcagtatttgtgaatctgagggacctaaactttattaagtggaattcacgtctgagaaaacacagtggaagaagaacaatgctgcccatgactgacttattttggaaaatctctctctataaaaaagtctctgaacagacactgaagatttgcttaaaaagtaaacactgtcttcttcccaaagaggacactcaagtgtcctgaaatagctacttaggaccatcattttgtgacttagagaaaatatttcttagtctttttataatcagatatccttacaaaatattgccctttctggctcacaaatatataatgagtttaagcagttttacacactttccttaggaaagtgtgatttgtattagtgagaaaacaaaaccaaacaaagcaagggctttgtgagtccagagaccatactccgctaagagaggaaacacttggcggaagctggtcctagtcagacatcaaggaagatgactggaactttgcaatgtgctcagaggttacccaaagatgctggaaaactgcctccttctaacaattaaaaaaaattaaaaagggttttcagatataaatgagcccaatgcaattcatttcaatccatggttttcaaaatgtattccaatagaatagccgtgtctcctgagtctgggaaggatggaaagtgacagaactcaggaaagtgaattaagaacactctgtcatcaactccaactacataataaaggtagaaatgattaagaggcagcccatctttctaaaatgtaaaatgggtttataggtccttctaataacaacttttactcaaaccttacataaataggcttagatgatacaaatattatgtgggccgtgtggacactcccaggttcctaatcatgtttggggattactgggtgaaacagaggcatctcattcctattgggctagggattatggcaaagaaacatctaatattccattttttaatttcatgcattttttatttacctttaatgatgctgtatatattcatcatcctgaaatattaaaacagtatgaaaaaagtaataaattggtagaaaatttaaggaataagaatgcaaccgcacgcaaatcatacactatcaagtgcttgatacacatttaaaattactgccgaccaccgcaaagccaaattccaagcaggtttctgaagcacaaagtcacaataagaagatcagcagaacagactgacataatagaatattcatccctctaatccgtatgcaattctttagggctttttttttttttttaaacaatgcatatgaggtctgactgtattcgggatttaaataacttgtctctccctttcctggtccttctgtacttttatttttaaaaataataaaagaaacaaaacacacctataacgttgacatgtctgcaccatggctctgacaatgtccagttagtgcacttgcttgcacctcagatgaaacatttttaaagcatgtaaatgttaatatacatttatttgtctctccctgaaaataactgtctaggaagatgggaagttaccctcctttgggaaggaaatgaaatgatgctttgtgtcttaattgccaactgataggttgatattgcaagggaaagtggcactgaaacgctggccataggactgagtgtgggcacttcaccttggctcaagtcacattctcctgcagactctgaggctgctatcagtgttgccacaaagaagagaaggctaccaaggagtgcctgtgcagacccacacatgcactgacagacttaaaaagccggagacttcattaaagaaagaagtcagaatacacaaagtggaagaagacattttcaaacatcacaccacctgggagatagcctgcagctggttcctgtcaatcagaagataggatgttggtgacctggtgtatggtggcccacagtgccaagtgcttgcctcactccttggtagcctcttggggtcaaaggacaacgtctggtgtcagttctcaccttctggcttgtttgagacagggtctcttgttggccactgtgtacagggtagctggctggtggcttccaggattctcccgcctatgcacccccatcttaccatagggaactgggattggacaggtgcaatcacattcggctgtaggtggattctgaggatccaaaaccaggatctcatgcttggaaagcaagcacttcaccccttgagtcatctctctccccgtgaacaccatatctcaccaaaaggtaaatcaataaatcagaaactagtatgagtgcctctcattcttgagttcagaagcttcctcttccaaccacctggaaggatttgtccccaccactctgcaagtgattgtgacagtaaaaggggcacgtagtgaagagagggaaggaggtcttcacccgctaagagaaatggatctacagggaaggacacctcagctccaatgtggagaatataattagaagacgttagaaatggggacacattcgaatgagaaggaaagctagcgccattccatggcacagttcttgagaacacttcgccacgctgacaataagtgactgctaagtgcccagccctcacaagacacctgtctgtccttctcgcccacaacttggggatcatgctgaaagaggaggccgagggtaactctgaggctaggaaggatgccataaaatgctgtctacttgacaaggcacgacaacactcataaactcatagaagccacagttacccacacttacacaagatcagattcttaaatagttttccatggatgaggccctgcccctcccctccccaggatctgttggcatttgatggttgttggggaggaggagacattttcctccagtggtatgcccactggtaaggtgcatatgacccagaaaataccctcacctgtgctcatgcaagcaattaagctagtgggtcatcagaaaaaggacctgaaagaagagggggagactcctaaggaagaagggtccagaggcggggaagaatatatatatatatatatatatatatatatatatatatatattattaaatatatattattatatatattatatatatatgatgaatttgtcaagaataaatatgttaatatttacataaagatataggtacatttatctaaagatataaaaagatatttatataaatatgtaaaaaggaggacatcccttgccaatccttttgttgtttgtagcatagacagtgaccattttccttccaacacagaccagaatcaagatgagctgcaaatcagagtgaagaatgagtttgtttatgaatgtttgaaacttatttcttcatctccctttgaaaatattaaaaacatttcaaggggaggggaatattcaaaatagcaaagggaagaagagaaaatgacctcctgaaagaaagacataaactgtagggaaaatgaaagttaacatcatctcatagcccctctaccttctatctaagtaactatgatcacaacagtgtcttctatgatcacaacagtgtcttctgtgatcacaacaatgtctccactccaatacattatctttttttccagatcaaattcccatgctagcaagcctttcgactctaggcactcattcaagaattcgggagggttctcaagttctcctgtgaacttatgtcagctgagagcaggtggttcagctgcagagtctccactgagtaatccagcatttggggaaagcctcctgtaagcagtggactacattacaactggctaccaaagccggctagggtcaataaattactggatatttaagactgatgacaagaggtcagagatgtcacctatgaaggggcaaagaaagcggtaaacctctgctaatatttagattccatgggtagctcccaccacattcttgaaggtcggttgtccctttctgtggaaggctctcctactgtgtctccactctgctggggagctcacagctctctatgctttgctttctcagcctttgtgagctgaaaatacttgatcaagatcattctgaaaatgcctttaagccactctgtgaagtttccagagcctggcttatgtcacagtttcagctgtgtgtgtgtgtgtgtgtgtgtgtgtgtgtgtgtgtgtgtgtgtgtatgtgtgcagcactcattcctataagtttccaagcaaataaggatgtattagagaaaggccacaccagggcagctggacaaagaagttttggcaactgtcatcaatcttgctcacctatcctgcctctcagcacagatgtgggcctcatttttcctagcaaatgcctatttcacctcatctagtccacagcttcgccctttttggaagatgctcatttgtgggattttctatttcatgggaaacactctacatgctttacacattcaaccaaaatttccatggttatttctgagagagacaataataatcaaatgccaaggattcttcaggattaatcctaaagcagcgtcccgttcaagtctcacaatggcatcttgtggtaggtgagtataatctcaattttactgtcacagtgcaatgtgacaccatccaggccacaggcttctgagtccgggatgcaatggtggtcccccttgtgataaacccagagagggttaggtctttgtcatgtacactcttgtctttcaaatgtttggaaactggtacaaagcccttggcatctttaaggaggcctaactgtcattacctgtaaagctggcgaagtttattatttcaaggtgctctttgaagataacacaatgttttgttccaaagtatgcatatactatgcctacccaatataccagtggacaactgtgcccaagctaagtgtaaataactggctgtggccaaacatcctgaaaaagacactgtttgcagatcgattttccttatgatacaaatcccagcatactctaacagtctgtgtagatatggaactatgtgaaataattaacacttaggggaaaccaagatactggaaaatctaaggaatctgtaagtgggatgcccatcaacaagacagtagtataaaaaaataaatagtggtacggaagtggtcaaggaaatggttggcaggacagtcacagatgatgagttgatagaagcagattcaaagtagaaagcctgtgctctccagtcctgcccctgcacctgctgaacccactgcacacacctgctgtttaacagggagcagacaggtgcgcagaaggtttatctccgaatcatcaaagatttgtgctgctccttagactggggctgcccctgggtatcatggattatccccaagttcccccgtttgtttatataaatgggccactggctgttgaaacacttcacagcacttaactaaagtaagcaaagctcttgaactttaaatatccaacaagaggagccattgacaagccaggttgctcagcaaatctcagacccactcagaatcttatacaaccaccaggtttacaaagaaggcacacagcccagatgcttatcttgatttcgtctccacaaagaagacactgtcctgtttggggacatggttggggcagtaatcccacccagagtcttttgctggctctggtttttgttgagactgaagatgagcttaactcaaggagagaaggagcgtgagcttaaacttgtacatgagccttctagctttctgattccttttcaaacagctagggattacagagagaacatctatgagaagaagcatcgatggacgccaaggtgtctggataccaattagcttgtttctgaaagaatttgtctaagtcacaaatgtctccaaggccaagaatctaatctataaaagagggaggaggatggcagagccccttttcagctctaacaccccagcgttctcctgtttgctatattcacaatggtaaaaccacttggcttgtctgggtagcaggagaaagaatggcagagactgatgtatgcaaaattctaggaaacatcctctcccagatgcaatggacatttttgtgccgctcctttcacgtttaggaaagaaccaactgcatgtgcccttgctgatcccaggaagtgtgaactgtgctctgggatgaagctggttgtgtgaggtgcttctccttccatttcctttggaaagccataatcttactgaaattgccaaagcgatgtagctctgattctgtgccagcaggaaaacccaaaggaaaactcattcaccagaagaaatttaaaccttgtaaccttattcccgagtttctttcaaggctgaccatgggctgaattccttctcttctctgtttgcagctttctgaccatctgtttgtcacctcttcttgaggtggaaaaccttactgcactggggattgggagctgagacaagggctctctttgccagacttgagaccttagtctaaagattttgagagacttgtaatttctacttgcaactggcctatgatttcataatttagagtatcctaagcattaaagtaataattacaatgttaccacacacaaactacctcccatgacaaggaaaggccagtctgtttcctgtgcactctgtaaaataggaatggctggaaatccacaggtgttgggaacaggtttctgaccacagaatttttccttattatatcccttctgtcataaccatatgtaaagatggggaaaagtaaaatgacactctttctcaaacattccttaaggctctgctaggactaatagctaaggttttgtctaatgctttgtcaggagcatccacaaggttcaaggacttttttgttttgttttgtttttgaaaacctagactagagagtgggaaccaccaaatgataaaatgtagtcttgggcacagatcctgcagggaatcgctttacaaattcccccacaccctaagttataattgggttttaatgcataaaatggctgagtaatttaaatgtttagaaaagaaaacagcctttactagagtttatgtagtggtaagcctatttgttatgatgattaactgtgattcatgtattcaagcacgggtgtagtttacacagaggaactgcagaaggcagaggaggcccatataccaaactcccttcctattatggtggaccagaagcagcaggcatttttctgagagatgatgatgagatgaacaagctatggacagtattgagattgcagtttccccagctgattcaccttccaagtggagaagaaagaaaaatacatcccaactgtctgtctgccagtggtctttcttaaagacaaactgcagtccatgagagggtccatagtcctcaggaaataacagaggtacagaggcctggctttggtttcttgatcatcttcttgcttataattagagcctctctatgccattaggtcctggtcacatactgtgaaaaagcatgatgggaaaaggagggcctcttgcccctcctgaagaggaacgcaggaaatagacattgctactttcacctggcagttctgaaagcctcagccttcctgccattcaaggcaaggagtggatggaactatcattgccccaagcctcagaacggtagaatttgggcctgggctttcccaaacattatttattcttttgaaggttgctaggatgttcttcctaaaaagctcaatagcaaactgcaatcatgtagagtgtgtgtgtgtgagtgcgtgtgtgtgtgtgtgtgtgtgtgtgtgtgtgtgtgtatgtgtgtttgtgtgtgtgtgcactcgagtgcgtgcacgcaactacgcattttatagaaaactgaggctaccagtcttatgtgtcatttctcagttgccatccacatacttttgactctcttactggtccagaacttaacataaattaggctatctggtcagcaagtcccagcctactttgccaagctagcacttagattctaagcatatgctaccaggctcggttcaaactcgggtcttcaggcttgctaggcaaatgcttcaccaactgagctgcctcctcaacccaacacatgtgtgcgtacttaacttttaatgagaaaccattaagtggtgggaaaacagaatccacgctggattgttctaagcatccagggggatgacaccagcaaagacactggaagaagctgtgagatgtgacatgtcatcacggggaactcagtgggatacacagtaaacacactagaagagacagtggggcacaacatgccatcgtggggaaatcagaacattgttaaaatctctccccagctaagaggagggaagacattccgaaaaacctgacatgtcacatgggaagttgtttccagttaacagaactgaagtggaagagaggaaagtatggaagataattaatatttggcattgttcatgaaggaatcatgaggatagttaggtaggcatcttggtgctgtaagtcagcaatggttgcttacaccctccggaccacagtggacagagagaaacttctggtaacacaattctacatcagcagcctagtggggaccttctagatccttctagagccttccatctcctgccagttccccaaatttaaactaaatcaatgacctcatctctatcttgccccaaaccttcccaactagtgaagtcaatctgctgtcagggtccaaggctctatcagcatctcttgtgtaagtctcggaggagaataaactcctgctcatgtggattgtgcattccttgctaacaaaaccagaggaacagcaggctttacctgagtgtgttcatattccaagaccaaaagccagggcatgtagagttcattgatatatcgttcaggagtttgaaaagaactacacaaatgaagctctaatgataaagggctcaggtcaccatgatccaagcaaattttttttttttaaaagaacagaacagaaagagagagacatacagacggcaggcaatcagtgtgtcaatgagcaaactgctgatggaagaaatctaatggatattcttatctggctaggtaaacgcgtggcacgatgaaacagagtatcaaatgtacagtgtgaaataaagggagctggtacacctagcgaccttgtgtttcatgtgctaactgtgagatctgggcttgccggccatatctaacagcacggtttacaacctgccccagaagtcgtgagaggtgataagcagaggttagcgacaaatatgccattgtattatgtagcactgctggctatcatgtgaatttcttttataaacctttcccaatttcatttcagagtctattaataagtctctggagtagagattacggatcccattgagcagataaagacacttaatctgaaggcaaagacgtttaccattgagtccaaaagtctttccatttgagtttctgccctgatttcccccaactgatgcactgtgacatggaactagaaaccaaacgagcctttccttgactatgttgcttttggtcttggtgtttctcacagcaaccaaatgaaaccagaacattctgcaacgatcaattgaccaagtaaactcaccttacatgtctataatcggggcagaagtgatctaaaactttcctttcccagctgcactggaagtggatggaggggtgacttactattgaagagatattgacgctcaagcattgatggcttcaaaactgcaggaaaataccactcggatgcacagattacaacgtttgaaaataccactcggatgcacagattgcaacgtctgaggaggcttagaaggtttgtttatgattaatgttagtagcggctttctgtgtgcaaagtgacaatagctggttttaactccctctatatgtctgcctgtaccttaaattatattaaattatattaaaaattctggttatgccagtttaaagaaaatactgtaaagaagttctatttattctgttgtagttttagaacttctttagaatctgtctgaagttctgatggagtaaccccatgggttttcgtattttcttctgactcctggaatccacaatcacccatgaagaagcgagtctaatttcccctctgcccctcaccaactacatggtctcaaataccagaatctctggactttgtcacctataaaacaggaatcatgagataatgtccaccacccaccactccctaccccgctacaaagtggagtttcttaaaattgcctaatttttcaaaacatagagtgcttccttcacataagacatgatattccactgtatgtgttgtatgtacatgttcaccttggtgctcacacctgtgtgtgcacgtggagaccagagctgacagttggagtttccattgccagtctctgtcttattctctgagacagccccccttgctgaaactggagcgcactggctgactgaactggctgagcagtcagcaagctttgggatctgcccctctccacaaccccatttctggggttccaggcacacaccaccattcctagcttttatgagctgaagatccaaactcaggtcttcacgcttgcatggagggtattttactgactaagccatcttcccagctctgaccttaaatctggattaagccgatgctctgtgtatgtgttctatctcaacagtaggcttgatatgaaaccattgaagggtgtacactgagcacacagcagcaagcagggtgtgcacagaaaatatagaggaaaagagccctgttggtcacagttaggcaggacctgccagatctggtagccacatacagaacaaaccaaccaccaaaggagactggggaagagcaaagctgattcccaacagaaccaaagtgaagaatggactcatgtgaaaggggcattgggtcagggatggaagagaggaggtgaaattcctacactggaaactgaggacacacaatgggaaataaataagaacttgtgcattctctgtacattgctaacacttatcgttatggccctcagttcattttccaacacctccttgtctgtgttagccttggcttacatcataaataactctttccttcgtaaaactagcagtggctgaccgtcatatttgccaaggcaaggagagaatgtatgcgggacaattcctacaggaaaagctgtggtctcctgctgccccaggcacagtacttgtgctaggaagaaaaatactactgtgacatttgaacacttggcggcagttctgattatagagaatgttcacacatgcgcacatacactcacacacgcacacacacacacacacacacacacacacacacatgtacactcacacacgcacacacaccgcacatgtacacaagtacacacatgcatgcacacacatcaaacacacatgcacacatgtacacaagtacacacaggcatgcacacacatgcacacacatcacacacacgcacacacattcacacatgcatgcacacacatacaggagcactgtaagcttaagaactgaaagtaaatactgctgctgaaaatacttgaagtatataatgattgtggggttatttttttggggggggttaggtctgtttctctttatgaacgtcttgcttaaacatatgtaagtgtatgtgagtgcctggtggccatggagactggaagaggtcagtgatccctggaaatggagctaaagatggttgtgaaccatcacatgagtactaggacatgaacccaggtcttctgcaagagcaacaagtgttcttaactactaaactacaaggaaaatcaaaatcatgtgaccagagcttcacacacacacatacatacatacacacacacacacacacacacacacacacacacactcacacacacacacacactcacacacactcataaacatgctctcatacatgcactcacatacacagctacacatgcatgcactcacacatgaggataagggggattattttcttagcatatctgacattgcttatagtgtatacacgtctctactatgaatacaaacatctagcacaatgcattaaaccaggaaagcatggctggtcacaagaatttcagtttttatttaatttttcattcccagtaaagagttgaaagcaaaatctgactttcagggcctctgcaccctgtctacaaagaagggtgccctctcaccagcagcttttcttacactctaaccctaatcctgacccctttgctcattcctagcctgctctactgtatttgtaatgttgcttggtctgtagctcagtgaacatttggcaatccctgagtgtccaagtgccccatggttagggatgagtacatagcatcaggagtcagcctggggaatatccatccaccaagatggggctgggttacttgttaaagacatgaaaacaaatgagacacaagtgcacagatacatgcttaaacaggggctcttttagtatttgttttagaagattaagctgtctcagaaaataagactcaattgctagaatggctgtggaatccaggataataatctctctgctctgtgaccctgtgaagtttgttctttctctacaaccagaactaagacttggagagcagccacccccagcgtgcgagcatgctggcgcaagtatacacacacacacacacacacacacacacacacacacacacactcatacacatgtacatacactcatacacactcatacacaaactgatacacactcacacacactcatacacacactctcatatatactcacacactcatatacacacccatgcacacactcctacatacactcacacactcatatgcatactcacatacacactcacacacactcacacatactcatagatgcacactcacacacacacacactcacacctgctcatacacactcatacacacactcatacacactcatatacacattcatgcacacacacacacacacacacacacacacacacactggagctcttagcaccatggagtgtgtctgtagatgtttgccaccgcagtttgcatgggaagcatctttacaggctagtgtatttgaacagctgccgatcagccagaaacttttgaaaagtttgtccatactgtttatggagtttgcagaatccttggggcataggttctagctgacagacatagggccacaggctgtgaagtgggaccagggggttaagccagcctcgggttgcctggtccatgaaacccaaaacagacatgcagctgacagcagccaccattggatggaacctcagggacccacacaaccatgctgcccccaacatgaaaccatgagctaaaataagctgtgaggcattttgtccctgtgacaagaatagtaaccaattcagccagcaatatctctaatgatagaagggtagagccagtgtgggtgttaaccctcatcgccacaggcctctcggcagtcatcaagataaatgacctctgagaaagtttccatgtagttacagcaatcaccagggtctctgccactattcctattttacagatgggaatggtgagacatatcaagggttagtggcagttttaaaatgcctggaattgaagcaaggaggccacccagacccacctcactccaacagctgtgccatcagcactgtgcctcattatcttcttgccaaaaacaggatatgcagaattcagctgtgtcaaaggtgtgaacccctcacctcacgcagaagctgaggcatcagtacaggctaggagagactgtaccagagaaggtgacagcatgtcaaagacgtacatacaacacacacacacacacacacacacacacacacacacacacacactcacacacacacacacacacacagagagagagtgagagagagagagagagagagagagagagagagagagagagagagagagagagagagatttgatcaacatcttccttctgcaactttgaatatggagctacaatgtattcattgcaaggtgtcattagggctggggccgcttcacgtgttaccaattcatgggcagattagaaggtacattaataacagaattaatatgaagtgctgaggcctccacaatcagagacaaatacgactcagccgaatttcctgaccacggaggccacggaggaacaatttggtagatttcatcaacagttctaattatgttcctgtcaagtcgagaacaaagtaatccataactggggggcgctcggagacggcacggaagagtaatttatgcccaagacacagggtccattctgtagttagtgcgcacaacacttgactaacaagtgggctcaaagaggaatgtataaggaaaaaggcagccctgccacttagagaggctcatcggggcaagctcaggaagaggccgaggtgataggagcgtctgagcgcaggccatcacaggctccagaagtggaggccaaggatgtaggctgtcacccccaaacccctctcagatatcttttcaaacactagacttgccatgtttcttgggaagatttgtgggcagacttctaagcatagcaggagggatgagaaaggagagagagccaataaggagacaacttaggaaatagattttttaaaaataacagttcaatcctcagatagcattatcatcagaggtatgaggatattgtttgaagaaaataaaagggcccttttatgaagctataaataaagtgctaatggaatatgctagagaaacccttaggaatggaaactgaaatgtcacaatgcccttgcctccatcagcctgctcctgacatctacaaccaaaccctgagacagaggggtctgaaaggagttagaggggacaggaaaggggaggatgaagagggaggttggagatggagtgtaagaggccaatttgaatgatcttccatctctactggatatgagtctgccacaatagggtgactttgatacatggcactcatgttaaatatttcacaatgaggagcagctgagggcggagcggtgatgcgctcgctggatgaggtcttatccaagaggcaaaactgatgacattagcagcagcttggtggctctgtaaactagagcaccttattgcaaattatgcaaaaaaatcccacaactaattgcattattagcaaaaattacatttaaaaatagcgtcacacaaagaaccaaaattatctaattatctaatctaaactcgcttttgccaaatgagttttgggaaaaacatggggttttctgattctcaatcaatagggtgtagggaaagagaaacagagagaatggggaggaagggagagggggagagagagaaattttagtgttctaacaaaatattaacatagtagagcattttatagattttataaactttatagagcatacatcaaactgtaagattataattcatatcatttttagccagttcaaaatgataagtaattgatataataaagtctgtgtgtgtgtgtgttcatgtgtgtgtgtgtgtatgtttgtgtgtgtgtgtgtgtgtgtgtgtgtgtgtgtgtgttactgggtacagaaccttcacttgtttgaccatggagtgccagccctccctaacccaactataataaagtcttgatcagctacaaataattgcctctgcattaaagtgagggcaaccaggactctgctaagctgctctttggtttgtaaggcacgcccacacataggggtataaataaactccctgccccatggtgatgggaaggggcactggtctcatgcttctgtgagttctggaaccggaactcacacatttatgaggggatgatcatcattcttcccccagaccccttgcccacttcacctgcctaggcctgggaattctttcttgctttagtttgcacacaggcccttccgggtggctttgggttgctcagggtcctcatgctccctaggttcttatacaggaaggcaaggtaagacagcaatcagattctgtaggtaagcactgtgcagtcacccttctgccatcaccatacatttgacagcactgtatggaaggggctttgtttcttgccccatcttcttctttttaaagccatcactatctctactttaaaaaaaaaagcagctattgcaggaaaaatgaatgcaaacaaaggtgcaatgacatttcagggaacccttcaacatagactgtagctgccaagaacaagggagtgctccccgggactattagttttgacctgatgctcctgtggaagggacaggggcattgttcccctaatcttggagactgagagacaagtcacccactgaaatgccatcctgctttgaggccatggtatgtaaccctttgagtaaataacaacggctccatgaccacttcacatctgaaagctccagaaaggaagcttgcaggttaatatggcaaatggtcacattaactaaggggcagatgatggggcacctgactctcagagtctagaggaggagggtgcctcattttgaaatggtccactgacaccatccatctgatttcgctttactgcagaacacctagcaagatgtggggaggggtggcccccattaccaggaaactgtggtgtgaggtagttattttcccggactcaatatcaccaccaaccttcatgaatgaagactgctgtggcgaccaccagaataccttggtcctacagtcatggaaaagggatatgtaatgtggtatatgtaacaccacagaccctttgtggggagtcccagactttcacttgagattcaagccgtcaccccagaatctcatggtcttggagaatactagagtacaagaaggtggctgggtgactgaggatgagattccagcaatgcggctttcataagttgtcatccagtgttttgtggcaatttcctctaaactgaaacattccatcctggaagagagcttttcaagacctagggtataggcagattcctgagactaaggaagacaagtgctgcaaagccctctcctgaggttatacaagcagaaacaactgtttggaagaggagactctccaacctgtcgaactgcctgccattagcacagagattgctggagatgctaccctcaagagccctcatccagggtcctgagggtttttcagagatcctgttgtctttgagtcatccattttcctgcaagcaattacatccatccacttgtagccagccccagtaaagtcttgcttccttatatttggtgagtgtaaatgagggttaggagagcctgcaataaagggatttcaaatatttattggggaacactcatgaatagcaacatggtagagagcatggggatgctggaagcttcaatcagatctcccaccaccacaaaagaggcccagagagacccctcctcttccttataagagctcatgtccacacacagagccatgcccctaaggccagtaccccaaaactattggtggaatgaattcccacaacaggtgagtagatatttgtccacattgccccaggaaatgtcacacagtaccatgctagtgaagtacttttgctggtgatgtagctgcccgggtcacccatacacctttgggtaatcgccccaaaactctttggcttatcaaggtatgcttgaccagactctttccctggcctttcggtgtcctctctatggtgaatatgggtttcctcaggtctctccagaagaagtaacaggatacactgtagaccaaagatcgtgactgatcagatgaagggtcagcgtgttcacacatcttcacctctgtgctaggaagtcctataactggttagctcaggcctccttcctcacttagctcccgagaggccttgcacattgtaagtgctcacaaattacctgtgggttgaccttctgcggggaaactgagtatttcgtcaaaaaaacattgaaatgttgtactttgagttttataaaggaattattcagccacacaatatttttgaagataggtaatttataaatgacacctaatgtgagaaactccatctggtcccaagaatctgatcctaaagtgtgtggtgctcagtagatagttccaaggctgtacttggctgtctgtaacctcagctgcagtttcccaggctcctctcccttctcagagcaattacaaagcgtccctctgtaggtctgcaaacttagtggcacactgactgctgtttctagagactttgcctatgctttaagatgggaacttactgcttctgtgaaaaaattgacaccccaaattagccaattagtaccccatccattgttcgttttttaaaattcttttaaaggaagaggcagtaaacactgcttaaggctaaatttagagaagagcaagatcattcttctacatcaaggtggttgatccaattaccaaatttctctcagtgcagctgccctcgggctacttggttcactgtgcatctaaaaggtgttctttagaggcttaactgaggaaaacctgccagctccctggtgcctactcatagctgtacagaacaagcaactggcaataaacagtatggacagtacatttatggatgctgacttggaagggcccaaatgtcatgtcatggagtcattccttatgtagtggggtgagggcacactagatatcaaagatgaggagcaggccaggcatggtggtgcacccttttagtcccagcagtctggaagcaggcagatctctgtaagtctgagccagccaggtctacatagtgagtcccaggctagccagagaccttgtttcaagctagtcccccaacaaaaaagaaagatgacatgaggtgctgggatagacctcacttggtggagtgcttgcctaggatatttgaaggtctgggttcagtccccagcactggataatccagggatataagcattcaggagatggacttcaaagggtaacctgggctatctaaaactgtctcagaaagggaagaggaaggtttagaatcattattaaagtcgagttggggatactttgagagtcctggaacaaaggctaggtcactgatgtcacagccaggagaagatgacttaggaaaactaactttgattttgagatgtctggaacaaaggctggttcatcaatgtcacagacaggagataatcacttagaaagaataactttgaagacctgggtccttcaagcctcaggtgtgcatcatgcaactgtgccaagccctgtcaagccttgttggacattttaagaagagaagtggagactgtacaagtgggtgccgtgtgttgggtgagctttggcgcatcactggcagaagactgagggcagcagatgttgaaaccaggaaagaagtgttgcctaagaactaggaagaagtcaaagtgggaagaacttcatggaacctgaaagatgaagactgtgggcggggagcggaatgatgggtcaaagccacggagagttgtcagatctctggttgctgcttgcagtggggggatcgtgataacgtagtggctctgttggaagttgggaggaaggactataaccacttcacctaaaaaatgatgagagagctctgggtgtggtaccagatgcctataatctcaacactttggaggaggaggtaggaggatctgaatttcaaggccagccttggctatatagacagttctggacctgcctacgctacattaaaaacctctatctaaaaaacacaaataacagaagaggtcatgactgaggaggtagataacgctttgcttgaacatcacatcatcacacatatggggaagcatcacgtgacagccatggccatgtgtaatttttgtagactttaaattaataaaaatagatactctgaaaggaaggagggtgaatagcttcagagctcaagaccctgaatctggggaaagatgagtcgatttggagatcaggaggtcagcagtgctctcagagagagcaattaagggaagcaatgcaggaccaggaccacgagggctgaggagtggcccatagggacaaggtagagactggagaaacttgcgggtgagaggatgagacaagcaagctgagctggggacagcagtcaaggcgtggggaggttctatttgttcctttgctttgtggacttagaggcaggggtatcccacaagaacgcacagaggggctcacagagtcgattcccctgagatgggagaagcaaggatgccaaagctctattgagctctacaacagctgagagtggccagatgaggtagagagacaacttctaggctctggagtgaatcacaggactccagtgacaggagctttgtgatttggcaaagcaggatccaacagaatgggggctcagtatttgttaacagttgctaatgtgatgactcagctaaagtgattttctatgtcttgcaaacaaaatgctcaatttatgaaaacttccttttgttttacattgtgtttttaattcatatgcgtgtgtgttcttggtcatgcatgcactgtgtgcatgcagtactagcaaagcccagaagagggcatttgatctccctagaacctgagttagaggaggtgaagggactcaaacttgggtcctctgcaagagcagcaagtgctcttaactactgagcctttctccagcccctgtgggaacctctgtcccttaggaaacccattgttctggaagcatgccgcccttgttcaatagttgcagtgtctcaaaaggcagggattttgtttttgctgttgtttgtaagtatagacatattttaacactcaagcaaatgaagcattttgggaactcttggggttacttattcaaagaaagagaagccactgagttgagaagtctggggtgataatgacaaacatatttatgaccactagcctgattttcaaagctaataaaacagtgagagcaactgctagaatccacacagacaggaagtagacaggtgtgcctgcagaagggctatctcaaggcatcgaggatttctgctgctggtcctttgactggggcttccccggggtttcatgggttatccccaagtttgctgagacagacgaaggacaaaccttgagaaacaataaagaacatctttcctgccactctaggttccttcttgttttgaaactcaccgtgcaacccaggataccatacaactcaaagtgatcaattcccctgtctcagcctctgtgtgcttgtatgacaggtgtcagcaaccacgcctggctttctggtttccctctggtgcttccactggcaaggctcttgtggtaaggatcagttaatttccaacaagcaaactccaggagaaggaatcaaagaaaagcaggttgttttctcaccagtgagttaaagtccaacagcagcaagtcactgaacctaactgcccttctttcattattttactttactttcttattgcgttatctctgcagtcatagcaagggggcgtggtaccggcacaaggggctggacaggaaagtagcaggagcatatctcttggctccactctctgtgctagaagaggagcagtgaacaactgagtgttaccacaaccaccagacatggattttttttttctagaagcaatcatcagcatcagtcagggcagcagagtgagcccagcatgcaaacattttagctcatttaaaatcctccagcagccgaatcagacatgacaagacgatggcaaaaagagaggctattatccaaaatgagagaggttgtagatggctgaaagtagtctgagtggcagagacaaaggggggaagacaagaaataactgagaatggtaattccagagaaaacaggctgctgtactgtacacgtggacacccacacaaagacacgcaccccctgtcaggacaccacacactagaggagaaaagcaaatacttcccagctttagcactgggcagataaagcattcaaagagcttagaaaatgaaagggtctgaataaaataacatgaacaagttaccagtccagtcacaggtaaatatacacttggaaaaagagagggctttttcttttaaataaaaatgccccatttccagggtgactaaaaccataatttctagcttgaattcatgcacagatgttaactagttgttattagggtgttggacagggagccattggcttgggaccagcacattctatattaaaaggaagccagaggtcaccaggtcaccaggatgatctgagatactgtgctagaaaagccaaaacatctaaagaaacctgatgggctcataagccacgaaccctggccactgtttccagcaccatggagctgagggttcaccagggaggcatctgctggcagaattacagtataaaagagctgaaatcaattttgtacacaccactcatgggacaagtcacagtgtcagcatcctttggacgcttcatgctgtggagtttcttccccagatgggaatacacattcagaggagcaagcatccaaaagccctgacctcaccttgctgctgcaacaggtgtgaggggtgatttttattcagcctgaatctccgtattacctcttcatttatatagctctgccagagaaggtgtgcagtggcaaactgctgtaggctatcccttggtcccagcctgttcctatcccatgaaatctatttacctcctcctggtaggtgacttgaagctaggtacgtagagggaagtacaggctacattgccaaagggtagctcacatccccatgtctcagcacccttgcctaaaactcagttctgactttggcaacaataggagtggctgtgccacggcattggggacaggttagctgtgacttcattgcatcagaatatcttttggacatgaatatccctagttaacaaccaacccccacacatattctcaatccccctgcccttgacacttcctttttctaggtgcagggacccggggcagaccatgtgacacctacaatgaagccctggaaatgcatcagaaactggaaaacagcaagcaaggaaggaacaacttgtgagcttatccctcagatcatcactctctgacctattaattgctttagcataggaaacgtgtctaatgatgtaggaactgttacatagagaccactgagagaccagattgagttcatagcttgttacaggatatggtggcattttaaatataagactaaaacattgagggaggcagggcagaaaagaagcagaaggagagagagagagagagacagagacagagacagagacagagacagagacagagacagagaggagtgagcacataaaccaggcatggaagatgggttcttagcatagaccttcccaacatgtttttccttttaggaccatggttctcagccttcctaatgctttgacccttgaatacagttcctcatgttgtggtgacgaccaaccataaagttgctacttcatagctgtaattttgctacctttatgaattacaatgcaaatgtctgtgttttcttaggcaatctctgtaaaaggggtatgtgttatgacctacaagatgagaaccactgcttgaggagatcccaagaaacagaaaacaggggtgtttttagagtaaatatcttttttacctccctccctccctccctccctccctccctccctccctccttccctccctcaatctcccttcctcctcttctcccctatctctcatattccaggctaaccacaaattgaccatgtaactgaagatggccttaaacttctgatcctccagcctgtacttccaaaatgctggagttccatgcatgtgcccctcctattcctgtaaccctggggatgttggatattaaaactggggctctatgcatgctagacaagcactctaccgactgagcaacacccctaggccctaaacatcttacttgtaaccggagaggccagccatctggtgagcatagccttatgtgcttcccttgtcctgggagagtccataggaattcaatcaggaaggaaactggaaggccagtagcaccagagagagagcagctgccaccttcatttaagacaggactttaatatgaagggacaagttctgagagcatttcgtagccccctttagagggcggttaagaataatgcctccttgggatagtagcaggccctgtaaaaaccgagagacaggtaacgtccagcaggtcgattttacccactgaccccaattccactcccctccagcctgcagaggcaggtgaaaagaacagtaagggaaatacagaaaatgcaggcatctagttttgtttaaaataaaaaacccaacaaactttcaaaaatatacgatgtaattctagcagttgaaatactgaaataggaggaccaccacaggttcaaggtcatgaactgcagaggaagctctaggagagcctgggctatagagtaagatcccttctcaaaagcaaatggcaacaaacacaaaccagaaaagtattcatgcttattaacccacgctcaggaaactgggaaactatcattaatctttacaatacaagaaaatgtccatttttagaagagcccagaagattgccaaaagaaaaacaaaagaccctctgatttgcaggatggtgctctattctcattatggctttacttttcatctttccaaggctaacataacataaatctggactattaaaaaggaaaaatgtctagaaagttattgctagcatggataaaataatacctgtggacattttcctacagtattcacactggtgagaaagactgaagtatctacagctaaagatgattctagatgcaggacctcctcgtttagaaagcatttgctccgggcatttgcacaccagccctttccaagcaaggctcccctgtctccctttttatattggaattgaagttctattttcctcccacagtgtgagagcacaggttatagttgcagggggtgggggtcggtgctgcctacagagaagcctggcaaggtctgtgggaactcttatccacatggaacacagtgtcaagggttcctactgggaaaaaaaggtatgctgaagtctgaagagaactccgtagtaaatgggatacccagatgctggcagcagtgactgggactgagactcctagggcttcggcacatcaagagccagggtgtgccctgggccacaagctccacatctctgtccagtgcatgttgtccaagaacaaggcagagatgtgctttgtctggagatgctgcactgagaaggctgttagcaaaggctccggtggaataaaaccgtatgtgacacctttcgaaggcagactcagcagaaccaagatggccatttgaataacttttagagggttttcccatgacaacatgtgctctggtttttatgtaaaaaatgtccccatggcttgcaggttagaacacttggaccctagatggtggaaacttttagaaggcagaaccttgctggaggaagtggctcagttggggatggacctccatgttttatagcccaggaccatttccttttctcttcctttacttcctaactacagatacaattcgagcagtaacattattcagccagcattccttccctgctccagcatggactagacctacttgaacagtaaccccgcccccacccccacccccaccactgccagaaaaagaaaaaaacaacttctcctccattcagctgctgcttttcaggtctctggtgtccaaagagaatagtaaggaatacagcatggatcagtatccagtcactggtggggaagtaacaccgttaacctccaaagcaaaggtctggtggtttgcaggggcttttagactgcaagtctacatggcagcaacaggttcctaaacactgctttgtgcctcatagactggctgagatttgaagcacacggaagctgggttattctttgaacacacagcatttcacatagtcccattaaacagggattgaaactcctacctatgaatcctatactgtcataaagtgagatctggggtgtagctagggagtcgactacttgcggagcacacaggaggccccaggcttgactctgagcatgcacagaaaaataaaagcagtgctgactacattcaaagtcggtactaattcttttcttttgccttaatgaagactaaccaattactttttctgacttgttctaaattcatggccaccagacacttgaacagaatactctggggtctccatagctcaaatgttactgaagagaaaattaaatcgctaaagagaaagctcttaaaaaacaaaaaccctatgcatcaggtcagcaagatagatgcatggataaaagcaattgctgagcaagcctgcttaagtgaacttaatctctggagccccaatcaagaagggagaaccaactccaaatgttgtcctccaaacattgtctttcatgtgtgctctgtgatgtgtgtatactctctctctctctctctctctctctacacacacacacacacacacacacacacacacacacacatgatggaggatgcccttctgtatgctgtgaatatatatatgcctcttattggttgatgaataaagctgtttcaggcaatgggcagtcaggatgtaaccaggggctataccacactaggagaattctgggaagaagaatgcagagagtgaatcaccagagagacacaatgtagctgctgagaaagaggctcaggcatcaccagttatgccaaaaccatgtagagacacacagattaatagaaatggttaaaaattaagagagagctagccaataagaagcctgagtcacaggccaaacagtttatattaacacaagcctttgtgtgtttatttgtaactaaacagctaggggaccaggtgggacagaacttccatctacacacacacacacacacacacacacacacacacacacacacacacccttaatgctaataataaattattttaggactggagagaaggctcagtacttaagaacactggctgttcctccagaggacctgggttcgattcccagcacctccatggcagcttacatcatccataattctagttccagaagattgcacacccccttcttagctctacaggcaccaggcatgtacacaatgtgcttacatccatacaagtaaaacactcacacaggcagaaaaataaaaatatatctttaaaatataaattcctatccatcttctcaaccctgcccaacaaaggagctatttaaaaactaagtttgttctgttgcatgttgagtttttcaatttttatggattcattttcttttcccttttgaaatcctacatgagatgcaggaagtttcaaaattgtggttttattattattattaacaaccttttctttccatggtgctttacaaaatattccatcagtggaagtgttaagcaggtcacaaagactaacttttccaaggtattaaatgaaaagatgttgaattactttaaatgccccacaatgaattgacatcctccccctttttgatgaaagctaagattgatgaaaaataccacttatctacattaagggtcaaaatctctcacaaaaggcactcctggttcaacacatcagaacagagtcagtcttccataatccagggcccaggactcggatcacattctgatgatccaattaatggcggggtactttgcaataagcgggcaagcgaggcccctaacagattgtggggctgtaacatcaatttcttaagtgcatttaaaggattacaaatgttggtcctggtttgagattgaaacaccttttgaggtgctccaaaccacattaccgtaattgggtacctgacttaatgccatttcttctgacgggtgattcgaatacattggaatgaagatttctttctggtgtattatgctttcctcctctctcgtcctttttcctccccttgaaacataaatctgaagtgaaatgcctcttttcatctagatagctttaattccagccctggggaatgcgaggtttgtcccaattttacctcctgcactgttggggtgcaccgtcccccgagcttgttgtcttaatatgcagcgctcaggtgacggaaatacaagtctttccttaataaaagtgagagaatacagaaagggaggacaaggctaggcgtccttcctcaggtgagatgagcatctttccatctttccagtggtagaggatacagttagacctcttagacctcaccacaggatggagaattagaaccagactctccctgagttaccctttctcaggtaagctcaaggaagaactgaagagatgggcaccttctggaattttcaccctgcattgctaccaagtccctcaacttagaggaaacacaacttaactccatgtttcgatcctccccagagtttgctattgttgagagactaaaatctaagaccttgctttaatctggaaggtcctaccaactctactgagctcagcaatgccatgcagatttaaatgctctccagtggatgccctggactctggctttatccaatctctcttctaaacacaccatgttcccctccattcagaccatctgcctctaataggccgctgtgtgcactttcagggttctcttaaagtacaggctcgcagcagcatttcctcactctgctgtaaacagcgtgcatggagcgtggccctaccccattcaatgtcacatgcacatgctcccaccccactcaatgccacgcagccatcctgatttattcttcaatgcactcctgtgtatgatatatgtatgctcacatgcacacacactagtcatacaggcaacatacactcaaactcgatgactgcttggaagcagggactgactgattcactaatattatgcaagcaaccacaacagtacctggcacaactcaaatatttgtctagttgaattgaactcaatttttgcatggctgattctgcttcattattccagtctcaggtacaatgttttctttactgaagacccaagatgacttttatctaacaaagcacttcccttcccttctcttcaagccagtagcgtattaatttgttttattgtcttcctaacagatatcggcatcagaaataccatatgcatggtcatacagatatacataagtatagatggtttgtgtctatccttcctacccatataccaaggttcaaagaacgtagaaatgttttcctagcttgctcactttggtgtatttagtgctaagaatagcacatggcatgcaaaatgggaaccatgaacacagggcaggtgtgaatgaattctaagcatcagttgtcagatatgcaagaacccttttcagagcagaggtacaagtggcagagatctgtacccaattttatcagcgctacagtaaaggctgaacaccgtgaagctgatgtgcacacagtgtcgtccattctacttcttgacgggaaaacacttgacgacttgtgggagacgaagaagagctgggatggtccatggcactttagagtaaagctggcattgggcagagtgggagaaaggaggcctggctggctgctttctgcctatgccatgccctgtgccttcgctgctggcaaactataccactgtccggattccaggatgaagcatgtcagcctccactctggtacctgactcaggttttccttccccagaaaacatgggctctggaactttctgattcatccctgtcctcttccaaaacatccaatttaggcatcatatctccatcatggaggtgggggtgggatggggggtagggggtggggtgggggtgtacacacacacacacacacacacatacacacacacacacacacacacacacaatctgtcctcttatactggagctggtgtggtcagcctctagactgagaagccataattactatgagttgtgatcatggcccaccctctcagaatagtggtattccctacacctgggtcacctctgctgctctctagaagaagggaaatgaactttctttccattccagcagggcacgaaacatacacaaaggcctctgggacttatttaagagtaaccatttcattctttttgtttctgcttataaaatccatttttcaaaggtttagtagaattctgggggtgttgctcactagcagagcatacgaaatagggttggggtacagcccagagatagagaccccacctagcatgaatgtccaaggcccaaggttctattcccagtactgtgactatatatgaaggaatttaaagtattcatacagctaaaattcctgaatgatactttatagtttgtttattttgttgacatttctctttgcatacctatatagttgatctcttaccctagatgctgtggaaatacttctctgtctttaaaattcttgataaaaagtatcagatgtggttcaatagtatgcacaggactctaaggtcaaacaccagttacacacacacacacacacacacacacacacacacacacacaccagacatacacacatgggcaccatacacacaaatacacatacacatacaccacgcacatacaccagatacataccagacacatatacaccacaacaggccacacacccatcacatacagacaccacacacaccatacactacacatacacatacatacaccatataaacttttatcagaataaataaacaataaaacattttctggcagaagtgtattgcctgaggttaacaatgccctataatagatattatgttgttccaggttttgacatataaacaaggcaacaataaacaggtgtttctgtctgaaagggctggcaaactttgcccatagatggtctgtccatattttttgcttcatgagccacatggtctttgtgtcaatgaatcagctttgccaaagacaacacttaaagtgaatgaataaccatgactgtgtgccagtaaatgtattcacagaaacaggtagagggcaaggcttggcagcaaagtcccagagctgttatctgtcaatgagacctattgtcctgtgtctctgagggagttcagatcaccagaatccatgtgtcaggtgtgggtttcaagccatctgtacttccagcctcagaagggacagacatagaactatatagaccctgtctaggcaggctcgctctgtgtttgattggaaggcctggactcaggataaggtaaaagagcaatcgatacagattcccaacagcagctttggacctcaacacttcatgctcacacacatgttaacactcccccatatagctatgcttccacaggcatgcaagcatacatacacataggcagacaacaaagacagtgcatacacacacacacacacacacacacacacacacacacacacacacagagagagagagagagagagagagagagagagagagagagagagaaatacagacatgaccaaatattctccagtaggcaattatgaagactgtggaatgccaaccttaagacagacacacaccccacatacatgcacccactatctcctctccccaaaactgttctgtaatatgaaactcagaagatgacgcagccctgacaggaaaaccaggatggaggccttggtgacacagatgcctcgtcccaatctgctagttttactgcatgatcatttcatgtagcgtcatggcaaagcctcacatcagtttcttggactttttttttttttttgactcattaggttgccctgctcaaaatgatttacacatagataattaaacttaagccccaaggactagttaactgtttagcagtgtatacatttcatataaccatttccatacatctagttttaaattcattaacaaaaattaatagccagcccgtgccgagcacagcgcagcgtgtcgctatggtgcgcttgctaaattgctaccttccatcacttctcccgtgatctctcagacacttaaactttgcagcgctagaaatgtggcccagcaatctgcagcaaagctcatatttactatatttagtgtgaatcactgactgaatgtcaggaaatatttggctatgttctgtgcgcctcagaggcactccatccagcttcaggaaacagcacaaacactctctttgctccttgtgaaatgactaaaacagcaagtccttgagtttatctttgaatatgcactagacattagttttatatatatattagttatatatattagttgtatatatataactaataaatcttatatccaatacttccaactgcactgcccctactcccagtatactctataaaggtaagatccctttgtaaaaagagctacctaggactacctttttaaaaaatttctaaataccaatataaaaggcaaaattagagagtaaatctctcttgtgcaaaatcacttatacatacttcaggactttttgtaatctaaaaatattttttattaaaaaaatcatctttgagcatacttcaccaatctctacagtgctctccacaggtttgaaagcaagtcagggtgaactaatgcattgtttacactccagatcctccatggcccaatcccataaaggtagcacaatgtgctggatctttgcttcttatgacttatcttaatcctaataactagccagacaactgactccagagaccagggcttatcaactggaattcgtcacatgaacccagcagaagacaagaaatgcattatatacgaagcctctgccaatcattatctctcagtatttaaaggtttgcattcaaaagccgacaccggacatttatttatttatctttcactgaactaaaaatctatttgttcctattaaaacctgagagccagcgagcaggaccgcccacttcaggtattgtatgcaaacactactgagagatccaagcattcttcctgctctactccaggcttggctatctggaacaagctgctttacatgctctctttggtcctgattatttaggaaacacatccaaaagaaaataaagggcctgtgttcttcaaacatggagaaacagcagccagcagactctgtgggcatttctgcctcttgccatgaagcggtcacctgggttccttccatgtggctgttacaaacagcagcaaccctgtgccatccatatcagtttgcctagatcacagcccgggttacaaacaaggtatggttctatttagctcacactgaggagggtgtcggcaacagcaagagcttcaggaaggttctggcttcagtgggtgatttcttacacctgagttaaattacagtctccagtttccatcctaaagaaagggagactcagagaaatcaaactttattctgcagctttacacaagacaaagttcgtttacttgtcagttttggagaatttctaactaagactttctagcatatctacaatgagctacactttcctactgagactcaaacaggaatatttacacaatttaaatagctgaagaaccaatcaattaattttaaatcaccgctttatttcttcaaatgaaatcttataaaaaaaatttaaatgactgctgtgttttcaccatttgcctgtttcactcctctaaacacactgtcccataaatgccatatgttagttcccatctccaggagagtataccagtatcaatccacttattacggtagtgtgtgtgtgtgtgtgtgtgtgtgtgtgtgtgtgtgtgtgtgtgtgtgtttcactcccacctttttttgacagccccccccactcaacctagaacttgagaattcagctagattggttgacctgccaactcctgagaacctgtctttgtctcccagggactggggttacatggctgtaccacccagcctcttacatggatgctgaggaaggacctcagtcctcatccttgcatgatgagtaggttaccaactgagccatcctgaccccagctcctgccttttgtcacttactcttttgttttgctttgttttgagaggggatgagtgtcttgttatttcacccaggttagtctcaaggggaacctcctaccatagcctcctcagcccagggctcaaagcggcagatgctcacacatggccagagctcttactacctgaagaacaaagtcaaaagacaagtagcatcacattttctctcgaggacagaagtaaagttttcggaggcatgcaagtacacaatggactatttgggaagagtggggaagcagtggactaggaaggtgagggggacaagagagattagtgagagacactggcaatgcctgaagagaggctaagcatgagatataaagaaaccccttcgtgtgtcactaacaatcgtgtggatcactgggctagggtctctttcaccagttgccagagctttgttgttgtttgttggtagtgaatagttggcttgagtttggatatatgatctgggccacagtggtgtctccactcaactatgccaagcacccgagaatgcaggtgctatagctggcccaatttaaagacacatttgttaaagacattcttccagtctatgcaaaataaaagcagcaaggtgtaatattaaaaggacatacgcaggaccccagggagcttatatttctccataataaatactgtactattttccaaagcgggggtgaggatggctgatgttactgaccatagactttacacttccactgagtcttctgagaaaccgtgtgcctaaagcgtacgggacaaaggacctgcaggctgcaggagtatatcttgattcagaggtaagctgagataagagtgaggttcaatggccaagcccttgctaggtagataagtattacctgggtatgagagagagggacaggaggtgagggggaagaggaaatggagagagagagagagagagggggagagagagagagagagaccagacagacaggcagacacagaatacatacagaaaaaaaagaatggtaatgaatatttaactataattttatattttattgattgtaattttattgattttaaaaatcttctcttatagtcatggccctcatagaagtatgaagttaaatataaaactctcttttatgtgggattgggagatggttcagtaaataaagcaccggctttgccagtgtgaggacgggggttaagatctcaggactctcacaaaagccagacaggggtgagagccctgtaatcccagcacacaggaggcagaagcaggaggttgctgcagcaagctggctagtcctaaattcagcaagggaccctgtcttgatgaatcaagcgaagcatgatcaaagagcacacctgacattaacttgcagccttcacttgcacatacacacacacacacacacacacacacacacttgcacacacacgcacaggaacatgcatgagagatagcatacacgtaaagtgctcatgcaaagatgcagttcattagacaatatgtctgctatttaatactttaaattgttatagaatactaaattattatttagtaaatatgagtgaagtaaataatataaatgttaaagttcaacatatttttaatgaatatattatatccacaatgagatattgtgatataatcataagttctgatatcttggaacatagggagggactaacaagcaaaggtaaatacttgtgcctgattgccatgatacctttttttgtaaagaaggaataagaatacttttccaagtgctcactcattcttagaagttgcctgctttgtctcagcatgacttgaagcccatgtctctctcacgaactaaatgtttatgtcccactgaaaatgcatatattgaaatcttaaccctcagtgtgctcccatgagcagtgaggtatctgggtgataatcacaccttgagggcagagccctggcctgtgattcctgttcttgtttacactaccagagagctattaatagctcctcttctttctgctgggtgagttacaaggagatggcagcctactacagtgcagaagactgacctcagtagaaccccattgcaatcacaactcttcgagttccccaaactgtgagagataagcttctgtagtttatatggtcctcagcctgaggtgatacgttacagcatccaacctaagacatcatcatggcctggcagcctgtaatcgggtgtctctcccatgcatgctgctgagttcctttattccgtcctgatctgatggccaaaaagacccatcaaacaaatgctggcacacggccgtctcagagtgagcaaagaaacgactatgactgtgccttgctcacgtcagatatataaaatggagaagtacaacaaatcaccaagtagttaatgaaaaaaaaaaagaatatacatgtactaaaaaaaaaagaaagataacccaagaagatctaggtagattctattgctgctgggaagtttgttctatgaatgaagaactcaaagtggggagaaaccttccccaaagggttcctgtgctagcttcccatataactgcagaaatgtccctttaggctggagagatgcctcagcagttagggttggcactggttcacagcatccatgtagggtgacgtcataactgtctgtaagtccagctccagggaatccagtgcctttttctgacccctgtggacacttatactcacatttatacccacacacaaatatacacacatacacatagttaaaaatttttaaaaaatgaaaaagaaatgtgccattatatttagtctcaagcccttctcaccacctttaaggaggttaaagccaaatgtttgcctctccttcagtaccacagatgtaaaacgagctcttggccttcattattacaaggacattaataaagaacccatactcattaatcaagaccatggtcacagcaatagtacatgaacaggatacaggaaactggcataaaagacacagttcatggctaggcaactgaaaacatgaataagattatagctaacacaactgcaaaaatgaacttggcttgtgtgctgaacttgtccttggatggacatattttggcaagttagcatgctatgtgggcatttcaataaagagactgtacatgatctctccggagacaagttgtgttttcctctgatatcttgctaaacactggaaaaatttggcataggccagcaggtcccgaaacttaaacttaactggattttgaatgaaatttgattcatgggattttttttctctctttttattattattaattcaagttagggaacaggcttgtttcacacgtaattcccctctccctctccctctccctccccttacccccattccttctcccccacctccaacctaccccccaccccatccacccaccactccccaggcagggtagggcccccaaccggggctccaccaagtccaccaaatcttcctgtgctgggcctgggtccctccccatgtgttcagagacagagtgcatcccttcaagtgggatgggctctcgaagtcccccacatacaccagggcaaaaagccagtccacctccggaggctcccaggagtgcaggggactccccgatggcatccatgatcagggggctggattagtcccgtactggcctcccaaagagcatctggggtcgatatgctttccctttttcaggccaagcaaaatagtgagaacaaccttgccaaataacatttctttttttttttaaagaaattaaaaccttcaagtccaagaatcaagtttgaattcagaacattgcacccaagagctgcatcccatccgctgttagctgccactccccaccagagagcttcacagacgatttcattagcacactccttggatatacacttgagtcgctctcatggactcctactgactctactagaacccatggcctacaccaggcacaatccacccactgctcatagtccccatgaatggagctgtctagaaatggtgtcagtctgaagtatccaagactattggagctgctaccctttgcaaccttctcccaaacttggtattgcccaatgtcttagtccaggatataaacatatttctaaaggtctataccacagttataccacggaaatgaagaaattcaaggaagaaactactcagacatcttctgttgaacaacatgtacaaaccaatcagctgactgttaataaagagaagccacaaatgttccaagtatagcttgattgtttttcagagtagtttccatgcccatatcaacgcaccatcatgtattgccagtttcttccatttcccacgatggaccatgttgcatccccaccacaaatgtatatgcacatatgttcacatgtgtatgggtccaaatgtgtataaggatacacaagcatgtttgtctacttgcaaatggaggtctgaaattgatatccgatgtcttcattggacacttaaccctttactaactgaggcagagtctctcactgaacttggacttgataactctgactgctctagctggacagcttgctatgctgtctggccatctgtctccacctggcttctacatgttgggattaaaggtggtcaggaggtcttcccagcttttatatatgtctggggttctgaactccagtccccatactcaatgtgacaagtattttacccactgagccatctcccagcccatcattacatgttatcattgcactgttgtcttcttgaatatcagggagtcatcgcatccatccctgaacatttcctggcatctaacaaataccttagaggtacccatatgtatacattagattgaacacaaatgagagcccgatacatttgattacaacaattcaataaagtgtctggactgaagggattgttcctttccactttcatttcttagggccagagaagcagaaaggcttctttcacctgggagaaatgctaatatctttactgtgccaaaggcagctatttatagctatgtgacgtcttgcctgatggatatcagaaagagctgatcacatctctcaatcacctacaaacttctatgctctgaaaacactgtgaagggcagcatctatggacttgggatctaacgggtcagggtcagtgttccttggggaaataggaggctctccttcaatagaatttgtctcatgtttatcatccagaagaaaataaaaggcaactttctttttcaaagtcacttaggaaatgactatggtgtttccacgctctgaaaaacagacaccccccacattaaagcttactgtaatggaatcaaggcttagggacaaagtcacagacctagcaacagcaccccagaaatgagtaggaaccctcagtgtacagtggctcccgacactgttagagcagactcaggccagtgtttggggccacccttgggtgaagcactctgttaatcatctcactagatgcttagaaaaatttctgtgggtaccactatttccccatcttgtagatttgaaaagtcacatgggaaagaatacagaaatctgtgcatattcaaaagacaatgtagctgccctcagcaacagaaaactaaaccctgccacaactcacagtcaagacaacaccaccaaggtgcagccagtgtggatgtgtgtgggacagacctgcattctatctgcccaactgtcgatgcctggctggcaccagctccctagcctgtgtaaacaccaggaaccaagggattttatctctgttcatattcaagttgttgaatgaggcacttcctccaactgaagggtgacagctggattcagttcactatctaggtgacccatgacccagggccagtgttgacacctatggataccagaggtcaaagtgcttctttttttgccttccttccttctttcctcatctccacagggatttataattcacatgaatttcttctttcaaaaaaaatttttgtgacatcaagaaacagggccaatagagtttgtgagcaaaggagagacaggaatgcacagaagactagaagactggcttttcttgacttcatataggtatggccatttcttcaatctgtctgcctccatctctttcttcgcagcgctctctctctctctctctctctctctctctctctctctctctctctctctctctctctctctctctctctctctctctctccccgaaagaacattatactcatgacagtgacaaaacttatcttgacctgaaattgcttttggatctcgtcctcttctaacatcaaaacactttatgtcaaagcaggtcaaggttcaaggaacccacaaaacagaagcttatttaaaaaaccaaatccattccttatcgaaagtggtgatactctgaagcacacagtagtaaaactaatttaacctttggaaaatcctctctggagagaagagtcaaatccctttataagatttttaagcactgcaattattgacgaagagtatattgcttcagtttgctctgatcaggaagagggggaaaggagaaaagccacaggagatgtcagcagctgtcaggctgttttttgagcagcgaagagggagtttacagtgggctagcaccagtctcctaagaccctgttaagaggcctttttaaaatgccttaaaaagccaacccatacattaatcaagttgagccctcatccatacttactgggatacatcaattactatgtctttttttaaaaataaattccggttgacagcagacaccttattaagactccgctaaaatgatacaataactagaacgctattaatatctctctctctctctctctctctctctctctctctctctctctctctctctctcctattgtcttgctgcactggtctgcaaacaaattcaggctgaatcacaattaatgccagtgaaactccttctaacgacttccagcttgctaattttttacgctaataataaaaaagctattgctatgcaagaacgacccccttttatcacgctggcataggacaccagagagtgtctgctattgttcacatgaaagacaattaaaccctggaacatcaaaccgagaaatgacagtctgtgagccagtgctgggcactgcttgatgcttccctgtacattctgaacagctaggaaacaattctctgaagacatttctttcctggactcccttaactagtctttggtgggggcggagggggggctactttaaagaatatccttggctgatttatgtatctccacctagaatgtattaactgtctggggccaattttacttccaatggagtgtgggtttcaattctggacatgaaaaagaaatgtgatttcaccagtatgtcattgcatttaaaaacaagcattaaatgtatgctttaagatacacacaatgaaaaagtctgtaaaggggggaacctaattcagcaactctgtatgtcttaccaccaatgggaagcatggttgaggcagagggcacctggaacaccacactgggaccaagtattgatattccacaagtcagagtccaaagatccatccagtctctcccaataacttaaagaacttaacttagaacaataacttaaataatgtgtttcacagaacacattctcattttctaggacagtgtcccttattggggctttaaggtcaatgtccagaataaatacgcacttaatagttcattcttcttcaaagatgtggtttcagattttgactgatgtttcatccacagtataaagaaaactggaaataattgcaaggccagctcttccacctgcttaccttgtgatgtctgtctgtctgttttagagatagcatctcactccatcacctgggctaaccttgaacccatgaccatcccatgtcacctcctgagtgtcaggattacaggctttcgccaccaagcctgaatgaacttgggctctctaggccacccagtcttctaattctctatttaccttctctatctgtaaaacaagaaggaaagacagacagctctcccttcaaaaaaggcttgtaaaggcaaaggaagaaggacgagaagactaaaggactacaaactgtaatcaaacagaatcttgcagaaggacagtgcatggccttcttggggccaaacaacagtgctgtctcctgatttagcatgagtggctcctaggctcaggacatgcaaagatgttccatttcatcacgaggtttccaatgaagacaccaaagacaccggtgctgcaataggttcgttacagtttttacaggtgcttgctctcttggtagagatgattgctccctgttccctgtgtataaatgagaacaactaggcctagggagattgagtgttgatatttgaatccctgtcctgatcactaagtagaccttgataaatgtcccaactgaggctatcaggagggtgacttcctatggtgagcatttgtttgaggtggcagttctgtgaagcaggtcaagggttgagcttaaacaatggtataatgtgtagtctctgatgcttactggcactgatactctgggctagtcattcatccctcaccttctgcatcggtgaaacacagacatttctctcctgaggctgttatgagggccaaatcaactagtctgtgtatggtatggagaaagatatgtaattgatgagaaactctcagtaaacatgagcccatgtgactaccctcactcccaggtctacagagagactgtagcagctggatagatggctcagtcaggacagtgtttgtcatgcaaacatgaggacctgaattccatctctaggctcctgagtttcaccctcaacatccacgtaagaagctgggtatggtgttgcaggattatagtcccagcactgaagagacaggaataggtgggttctggggactcatgagtacacagtttagccaaatccagaagccttatgcaccccccagtccttgtctcaaaatgaagtaggtgaccccagaagtacaacatccatggttgacttcaggcttcctcacacatacacacacagctgcacacagctgcacacacacacacacacacacacacacacacacacacacacacacacacaccacatagaaatgtgtacacacacatacacaactataacagttgaaagataaaaagggagaaagcaataggaccagtgatgtcttcattccgccaaaagttttagcctcaaactgccaataaccaaagtccagaattttaagaatcctgtaagtttctgcaccatgaggagaggcatggatctctgagaagtgagaaacaatgaggttagacttatgactatctcaacttatccctttgaaagagaatgcagaccatatggtagaggtgaaggcaggcagagcccagcagacagcttccataaggagacaaagctcctggcctccagaggttggggcagctaacttccataggatagagaacttgaaaagtccatgctgcagagagaatgctgcagatttgcagatgggcctcttcaagtgttcagcagaatgctaattagcatatgcatgtaaggaaattagccaaggctgcaggagaaaaaaaaaagaattgaggcaccaatgcccaaaaatctggaggctaggaaggatttgtgctctgatcactcacaaaggggaagtctgctagtgacagggtgagcacacagaaggttgccagcctctgctgggtaattctgagctctccaatgaatgctgttccagcttacaatcagatcttaaaattaaagttctaaggcatcaaattattgctgagtaacttgactgcatcgcagagtgaagtacagatattcatgaaaatagaaaataccttctgtgcggaaatgcagaccccaatggcctgcagccagtcagaagttactaggtgtcccatgtcatcagcaaaagagccccaaatgaggagtaaaacaagttgacttagatgttagaattagaaggcaagggtttcagaacagttgtaacagctgtggtttagacaagggctgagtaaatcctcaaggttcatgtgttaggaatcttgggtttgttgagtaacagtttcctcctggattaaaatgtttcatctttgagggaatctcattaaggtacagggcagaaaggatagtatgttctaatggaagggagtagacaactgagaagaatcaggatgtccctgaaatcgagcagattcactgggtccctctgcccctaaacatatgtgagcaccaaggatttctgaaagatacttcctgaccaattaagctgccagaaagaagcagaggccaaccaagctgcatgggagaggctcaaaccacctgaacggccagctgagacacccacagatatgcagtacactccaggtttccagtttctgtgagctgtcacccctgctggagcgggctttgccaaaatagctgtctttgagtcacttctgttctttaaagtaagccctcacccatattcccgtaagtaacacctcaccatagtactgtaagtaactcctcgtccatatctctggaagcaactgcagtatgttggactttggaggtgttcttacctgggtgtgtagtcagttatttatctggggtgaacagagtctgtttatgtctccccagaaatagtggggcaccagtggggtactcctgaagggtgaaagaggactagagagacagttcagcaattcaaagctcttactgatcctgcagagaatctaaggtcagggcccagaactcacataccaggtgcctgtaaccctgctccatgtggattcttcttgactccacaaaaacttgtatcacatatgcacagatctccacacggatatatacatttttaaaaagtaaaactaaaatatttttaaataatgttgggagaagcctttagaagtagagagatttactcaaagtggggtcattaaaagtcactgttaggggagatgagggcagatctggagacccaaagctggctcccataggaacaagttttgtaagaccaagttgccgtcttcccgtctctcatctctctttgatttctgtttctcacaaatggcactaccatgacatcagggaatcaggaaggctctgccagaatggatggtggttgtttagagctgtttgggctttctctcttcaaaattgtgaggtaaatgaatctttttactttatgaattatcaaacttaggcattttattacaacaatggaaaaaatcaactaatataataactgtattttgtatgcttccaatgtttaagaaagaaagatttataagcttataaaatcaatgaagttccagaaacctcaacataagaagcacaaagaaaatgatgccaaggtacatcataatcgcattgttcaaaatcaatgataaagaggaaatcttaaaagcagccagacacaaaaggcataaaggtaagaaggatcgtggctccctgttgaaagcagcgaaagaagacagccaggaaacatacttagagaaatgaaagaaaaaaactgtcaactgagaatttcaaattcctttcagaaacaaaggcaggggaaaaaaacacgttgttactgatacacagggtaaaattatttatcataagcatatctgttgcacaaaaatattaaaggacattttaaaccataaagaaaatggaaccagaaggatgcttggatttggggactttggaagtagctggatggttaaagcacttgctgagccagcatgagggcctgagtttgaattcctagcaccaacattaatccgaggtggatgtggcagattcctgtaattctggccttgggaggttgaggtggaagatccctggagtaagctggtctttatctccaaagaggaagaggaagaactaatgaagaagactctcaacatccaaccccagcctctgcaaatggacacacacatatacacatgcacacacacacatagacatagacatgaacatacacacagcaacataaacacacacacacacacacacacacacacacacacacacgtgtgtgtgtgtacaacaccgacatacacataaaaaagaaaaagaagcaaagaaaaaagtgagaccatatttacaccaatgacagaagaacaacacaaatggtaatgaaatatatgaacatattttttcccatttacctctctttaaagataatttacattaatagtagcatgtaatccaaggacaacaataaaagtaagaacaaaagaagtgacaacaataatacaaaactcaagacagaaaacattaaaatatactgctgtgagctgcatactgtcatctgattattgatggcagtaagtaaagatgtacagcataaatactaaagtaaccactacaacaaatcaaaagccaacatgagaacaaaagaaaatcacaacaatagtatgcaattaacaaaaaagaaacgggaaaggaaaagcatgagagaagaaaacaagcacaaggtaagatagataggaatggagtaccaaacaacagcctgccttcccactcatcacatcaaatataagtggtctaaaaattacaactggaagatagagattgttaaattggataaaaaattaatgcaactacagtccacatttcccacacagaacatataatcagacacaggagaaaacttccatgatctgaataagaatagtgttttttttttgatatcacaacaaaaccataatccataggttataaattttgacttcacattaattaaaaatgaatgctttgaaatatgctgttcaaagaatgaaaagaatacaatggcagaatactccatacaacataaaatctaacacaatgtttacctaggttatgaaaagaatgattgtaactcaagcatgaggatatatacaatctaacacaaaagtcaacaaaaaggtttgaaaataactccaaagaagagattacatgacagcaacacttgtccacactgcacagaaacagcagtgtgcacttgtgctccaggaagacgtgcccactcctctctgttttcttttgctgggaattgaacggagaccctataaatagtaaatgaggctggattctaggcagactggtaccattaaaaagaagccaagtactttctttgcactgttacagagagaaagatgtcttaaagacaatccagggattagctggaacccacccccccacacacacacacttcagtcttaaaggtataactcatttttatgatgtcttcttgataagaaagcatcccctttgccaagaatttgttttacctggttcagctacccaggcaatcactgtgtgaggtagcatggtcctggggattctggattctactctagcatttaccgtatgattctgtctttttggggcacgatttgcaggctaactgaggctgttgcccagatgtcaagaggaaccagaaaggacagacaactgaatgctagaagtatattaacttcctttaaaatgtttacgggagctccctgtagtgagtttgttctgagtctcagaagacagtttggaactgcagaaagacagagtatgtggtctcctggaactaactttgtcattgcctgaatgctatggtgtcatggaatttcctccagaatattaattcttgtagattaagtaataattactataattatatttagctaattataattaattattaatcaattgattattggttacttttaaatttaccatcatataaaagctcaggaaactgaaagatggcaagttcctttgtacatatttaacaagaatggtccatgtttcaattcccaatggaatccttattttcttctgaaacttcatgagtacagttcaactgaccagactccagttggcattagtctcagagaacccccagaaagttttgcttgcagcattcctacgctttgcatagcctacttcttctattgttccaaattcttcctgtaaacggttccatgtacttctgaagcatatggtctggtaggtcaaaccaacaaccttgctttcctgacaccaattttctatgctagttttttctgccactgtgatcaaatacctgagcaaaacacctagcatttgaccctctcctaggcttttccccaaagagaaagaaagcccacatgcacagaaagacttgtatacaaacgttctacaatgctatgagttatcttttaactgcctgggtgagataaaatacagatgaccactgaataaacacacgatagtgcatccatgcaaccaaagaagtactcaccaacagggcgagatgaacttctgatacaggcagcaacgtggatagatcttataaggattacgttgggttcaaaagagtacattatataaaactctggggaatgtggacctatctgcagagacaagtggtgatggtgagataggcacagggcctcaggggagagatgtattgagtggatgttacaggtcgacagagaagggacagtggagacagcttgagtctccaagggaactcaaagctagctactgaaataaaaggagcatgaagaattatctgtgtgtgcagcatatgtgtctgttcactatgtatgcagatgtgtgcatgtatgcagatgtgtgtgcttgtggcagaggggccagaggccaatgtcagtcagtgtctccctcagtcactaataccttgttctctgagatgggtctctcacaaactggaagctcactgattcatttggatctgctgaccatttagctctagggatcatctacctgtctctacccctctcaccactagcattataggtgccatcatttatatgagtgcaggggacccaaacacaggtcctcccacttgtacatcaagtattttaccaactcaccaactctcccaaccctaagaagcattttaattaatgagaaaataataataaaagtaattttaaaaaagcacagatcatatagaccagtggctctcagattttcttactcacaaatccaacaggaattcataggccaaatatcagaattttgactggcacctgggcataaggatttgtaaggctccctgtggtggccttgggaatataattttaaactgtgttataacttgacacatgtcctagttttttcagttattatgatagaataccatgaccaaaagaatgtaggttacatgttctagtcacagtctatcatgaagggaagtcaggaccagaaccaaggcagagaccatggacagccactgcttcctggcttgttacccatgggttggagtttgcgttcttatacaacctgtgaccacaggcccattatggcactgcccacaaaggtctgggccctcccatgcccatcattcatcaagaaaatgtccccacagacttgcccagaggccaatctgatggggatattttctcagttaagaatctctcttccaaaataactctggcttatgtcaagttgacaaaactaacaagcacaatataccagaggataggagagacagaataaaagacaaatttatactgtgaataaaacacagcatgtgtgcaaagcttttcatttttctcccctcaaggtcacagtgagataaaataaaattcaagtgattaaaattttattttcattcttggaatttcttcgctttcaagattgttctgtgtatcttcagaaaaatctcatacctgtcaccagtggctcagaagcaatcaccggtgtcacagagagcaattagttatcaaactggtgaggacatgaagaagcagggaagggtgagtgcatctatgcaaagccattgttccaactctaccattttgtgatggctctactcctgtatgctaatgagaaataaatatgcaaatgaaacaaaaatagttcacagatcttcttcaatcataacctttcctctcacatggtccctttgagtacccaccttttatcatcaccagcccctgccctctggttccttcaagcgtgaccccagagccacctctttgcagacatttctctcctacgaggtctctaccacttagacaccttcgtctttccttgtctttgctccatgtctccatcttcttccactcactggataacaactcatcctatttcttttctaattcttaagtgatttctctttaatttaacaaaatggtatcagagacatcccagaatccctcatcctagctgagttataccatgtaagggattaggaaggaaggatccacaaatctatgagtataaaatggaaggctgtggggggaattataattaggtatcacaaacacctgtgtgcacatataaactacctgagggggtatcaacttctccaagggtgataattttaagtgagactaatctctatcccagactggatcacaggacaaatcaagttcctcaaaacgtcagcaaccacttgatgcatttatggtctgcttttatagcatttgatgaccatttcctaggaagcagctggtccccaaatctacaagtcagtaacaagaaagcagagcctagttctgttgtcagaatcacctatgaggaagccagtgctaaaatcccccaacaacaagggccagcatggccgggaggcatgtcaaaatgtctcctacgggtttagttatcatttaaggattctgtacatatgttctcaaaattctggggaggagatgtcttagcttattttctagttgctgtataaaatagtccagcaaaatctacttaaaagagtttgttctggctcatagttcgtaagtatagctccttgtggtggagagtcaaggcactatgagcttgaagcagctgctcacatcaaacctacaagcagaaaacaaagaccatgtgggtgcaatggctaagctcactcctccatttaataccatttaggatcacctgctcagggtggggtccaacccagaattaagatggactcccccacaccaattgaggtaatcccccagtggcatacacaggcctacagcccaggtgagtctagattctatcaagctgacaatttgcgttaatcattcggtgtataactagagcaactaaagtagacagaatgagcggctaccttcttaaagagacatggcatgagtgcccaacatgcagggctctctcagaggattagccacactgggaaagcaaaagtactgcaaaggcccagctaggaaaagcaggtgactcaaatatggcttgtgatttccagattctatggcaatcgccaggcccacttgatactccaggaagcagcccaagggggtctttattctcctgacagacatctaatgacaaaggcatgtgacacttctaccacctccgtcctttttcttggtaggtctgtattttgatacatgaggtggggaaatggactctttgacatcaaaaacttcctacaagcagttttccccgaggcttggattttttaaagctattgcagtaagaaaaaatttttcccacaaaggaataaaaaacattaaccaaagaaatttccctctcaccaattcctacctcctcagaacttctttgaaaaggaaggacaaagcagccatttgctaagcttagatcattttgattgagactcatatgttattttaaatgaacattgctcaggtagttaagtcttaaaaatcaaccatccttgacaattgtccaatttttttttttaaatcttaccttaagggtttcagaaacacatttacgaagaccgctgcagtggaagtggctaagcgtcctgcctggcttcacagacttgggggactgctggcctttgtccatttttgtctttgaaaactttatgttacaattaaaagggggtagaactggaatgttttaacttgagtgaatctgtaaaaccctattcactgtaagaatcatacaaaattccaatgcatgtcaaacataatgcagtagcatatttaattccccaatggcttttaccacttgtttaaaaaaaaaaaaaatccgtttcctggctgacaatgaaaagtctctcacaacataaaagtcagagctatgggatgtttcccatattttttctttctttatttaaattttattttgaaacggggtctcatgtagctcaggctggctttggacttgcaatgtagccaagaatggccttgaactcctgatcctcctgcctttactttctaagtacaggtattacagggatgtaccacacttgctagtctctgtgtcttctacatacagagtctcccgtctcagacaatgtcagaatccttaattcctgaaaccaacagaccttttcatctttggttgctactccagagccttgggattttatgccaaacaagacaattaggaaagggcccccgggaagaagatgcaacattctgcagtctttgtcttaatttagaatctgcttctaagctctctgctctgattgggggcccaggtacttgtgttcacacagaaactgttccctttcacacaaattccatagtcatgccttttaacagcagcgaagagcaccgatgccacgttcagaaaaataacgtgaagcacacagtgaagaaacaagccctgtgtctaggcagtcccctttcccccaggagctatgcagtgcattcctgggttttgctggagagtgctgctataagtgaccatcttttaagggctgccatccaataggaaatgtgcagtccccttgtatggtatcatacaatgacaatacagtttattgttaaatacatctgtgctcaatggcatgaaatgtatagttttaggaaaagcacaggcacacaccttggttctacagaaagtctgccttggctgcactaaaacatgttagaatggttcactggggccccagtgcagtctgaagaggtagggttcctggagtctccatcttcccaaaggtcctcaggtagatctgagttccccacagccgtcatactccagcatccgccactggacctccttttgtgttttgatacaggctgtcacagttacaaaatgtgcacacaccaagcatcattcctactctttacttttctgctccatagctccttttttgacgttatatgtttatgattttactgattacaggtttttgtcagtttctccgtcagagttcaaactgtgaaatgagtaatggatggacccagtttacaataagaaactgagacatatattgtagctggttttcctttctttctttctttctttctttctttctttctttctttctttctttctttctttcttcctccaaggtcctttaagatatgtgtggcaatacccatgctgtgagaatgccatgtgatttcaggatgctcactcccctgcagtcagagtcactatcctgacaggaccggatggtgaaactgaggcagggaaggacaccacctgttaacatgtcatagagccatgcacatacaaaccaattgagaagacacaaaagctgcacttggaacacagactcaagtcccgtccttctaggcttacaatgatttttatgacagctgatgaaactagcccaggctgagcagtgaagaaaggcttctctaagtgaatgggcagtacaggagttgtcaagagaatgttcagctgcttaaattaaaatacctttatgggactctgctaagtcagaagaatctattgcattacaaaaaaatgaaaaccaactgatcttacatttgtaaaataaatataaaggatctaagccctctattggaatatctgtaagcctacactaatatagtttcagctacttatttattgtccatctcctcacttctgccaaatagtattataactcccatgactgcatgattcttttaggtataaaaagaaatcaatttacataattactatgagaatcaggacacagaaaaatgcctccttttgctccccagctccctctggtaaccatttataaccaaactcccctctactaccgcctggctgtgcctggctgctgttcatccgacctgacactacaattctgtctgtctgtgacactggaaccacacattatgaagtcttttgagatgggccctcaggctaaagccctgtccatgttgttgtggctatcagtaggtttttgcttttcattcacaagttgtactccattttgtgaatgaattgtcccagtttatttatgcaactgcgttggaggacatttggcttgcttccagttttggacaactatggatggactcagtgctagaaacattcctgtgtatgttttataagaatcctgtcaaaaattgtttttgtggattggttgcatcacgtcacagttttaccagtgatgtgtgtgtgttcagattgcctcagcctctgagcaattacaaaagtgagctaaacccaggcactgcatcacacatgtgagctaaacccaggcactgcgtcacacatgtgagctaaatccaggcactgcgtcagacatgtgggctgccagtccctgcagcagacatgtgagctaccatgagctgcatcagacctttgctttggcctggacaggatgacccatcttttcattttcttcacagtgtgagattaaaagttttcaattttagagttttccagattagactttcagtttcctaaggactttctgccccaacattagattgtaagggtccccctgtgttttctcttagctgacgccttcatgattgtgttaatttgtgtgcttccttttctctttttcaattctgttaatactcccaatcttatcaatagtcttagttttgattcttctctgcagcccttctatgtctaatttcactgctttctccacgtgtcttcatgtttatgtattcactacgcttgctttgtgtttttcattttcttttactagtttaaggtggggtttagaacgctggttaaaaatgcttttgctacacaatgccaaccttacagtttcctgtcataaagactttagctgtgtcacatgcattttgattgtgtgtgtgtgtgtgtgcattgttatttagttcaaaacatgtttactttttttcttttagaagctcttgccacacaagttatttagaatgtactgtgcagtatttgtgttggggaactttcctgtctttcccgtatcactatacacacattaactgttgatgatccagggacacattttgtgtttttccacactttcacatttctaaagtcggttttatgatgaagagaatcttctcgaaggatggttttacatgttccattacaaagcacatgcattctactggagttgggtgggatgctccccgagtattcagctgggtatcattggctgtggtgttatgcagttcctctaaagcactgatgactctgtcactggtttcatctgtttcggagggaggatgaggaggaagagggacaaggtggagaagggggagacaagggcaaagaggaggagagtcccagtttccctctgtaattgtaggtctgtttgtttctgtccagttctactcgtttctcgattcatgtactttgagtcagacacactgaacacttccaaaccctgctggcaaactgacccctgtatctttaatcagtttaaacctttttcattagttttcattgttgggaatcaacactttgccaacaacacttggcaaaagctccaccactgagctatactcccgtgtaatgacaccttccccgaggccccaccctgaagtctggttcatgcagttgaaatggcttctccagccttctcttcataggcattagcatggagcacctctttaatccttttactgtctgttagatgtctacatagaagcacaggttttgtccatgttttctttaactcctgcctgttattccttacttttagttattccatttagacaatgacatccactactagacacattcgaatgattatctacacctatttattttctaagattctcaaatgcccctttcttgcattctttacggttgcttgcacattttcagaattccatttgtttcttcttcttttgtctttagttagtttttttttttaatctctactgtactattctcaatgtacttagagttaatcttaccatttaaaaatgcaagtggaaactttctaccttatattttcatttccccttccccattatgttgtagttaactgtgtatgttacactacacactgtgagaagccaatcatttggtattaacatttttccaattattaaacaaatgttaaaaaatttaagagagtattgtatgtatggaaatatttattttgctttcctttgatacctaaacatttttaaaaagatatgtctgttttgaccgcctgtatgtaagtacaccatatgtgtgcagtgcctaaagacaccagaaggggcctcagatcctctaatactccagtaacagacaatgtaagccaccatttgggtgctgggaaccaggcccaggtcctcttcaagagcaacaagtgttcttagctgctgagtcatctctccatcccctcttaatttattcttgttctagtttctttctgtatttttcccatcctatttgaaagaacccctatacaaattctcttgaagttggccacctggtaacaaaaccctccattgttagatttttatcttattaatttcaaaggtaccttctaaatgttaccttctaaattctcctgaaatatctttggttcacctacctttcagagtggtgctttgctggatatagaattctgggttggcagttctttcctgggttggtacttaaacatgttgtatcactttctttacatcctccaaagttgctgatgagaaaaccatagtcttttaaattattcttcctccacacaggtatatgatagaacttggacttccaaaatctgtcttcattttgccatttgttttcatttaccaacaacatatgtcaacatggatttgtttgggtttgttttcactgaatttcttgagtctgtaagttatttttctttatgtatgtgtgaaaatcttctggccaggatttctgtaaatatgatcgggtaccatctctttcttctatccttgtgatactcccatgacataaatattagatatttccccgactgttgtgaaagtctctgagacttcatttctgctagtcattttcctctcgggctaccgtctgttgatctagtttcaaacttatagactctttcatttccatagtgctattgagttgacccagcaaatttttccactgtggattattatagtcttcaacttaaaatttccatttcagtttacttcttttttcttttctctttactaaaactttagctctatttcaaaaagtatttacaattgcttattaggacatttttatgttagcttatatgaaagtctttgcccatcatttccaatatctgtatatttttctgtattagtttatttttacatagggtaagattttcttgagtttttctatgtctagcaattttagatgatatcttagaaatgtaacacattatgttatatgactacacatcatgttcagttcctttagaaagtagaatactttgatacttttctatcgtaagaaagaatccataattttaaactagcctcctaaaggatatagttacaatgccaggtttggtttcaaagcctttgcaggcagttcagaattttcctgtgtgtttgtgctacccagcagccaggataaataaatacaggatagaatatatcattggtttctctttcactttttgcgatgctaaatttggatcgtattcttcccatagaaagcaacctagaagttcatggatatcattatatggtcatttccccaagtaccaactcagtgcatggatccatcattttctccttctttggacatccctttctagtcctccaactataagtttggggctttatttcttactcaggcatataagtttattcactagccacatggtacaagaacaacagagagagaaagggtagcatgggtttgctctgcctcctgggcccacagacatgagatgtctttattactgacctgccacagagtattcaaatgtgaagaagcagggagaaaagagagaccattttcacctctgatgactacccctctgatgaccgtggaagtctgtctgagatctccctgcgtgcacactggtgtcatttctggttctaacacagtataatcatgccatggaaacaccagagggagcggtggcagatagggccttgtccacttctggccgttgatcccatctcttcaggatcctcacttgatgactccacgaactcttaccaggtttttctaactgaatctagcagcagacacagggtgaatcgtgcttgctctatattacccagaaccagccctaagccatttttttcttttaatttgtgaaatgaatgtatcatatgcacaacctggacatcaaaccaacctgtccaacttaaagaataacaattatcaatgttccctcatctaagttaaaaactaaactgaattagccactcaaaaggtccagtctgcccctgcctccctcctcctacagggaagtcatcagaaagcagacttggtggcaatatttctctcatatctttgcatggctttaccacagtgtataaccccgatcatggtgatgtttggcttgtatggtttgcattttagtgaagcttactaaacaaaaataaattaggtcacatccactaaatgttaggttgcatggcctatctctggcttctgttccctggtccagcacagtcctgagctgctaaccaggaagccaggttctgataatgacatcccttatgtaactctgtaactatatggacatcatggagcatgtttatgcaagtctagatgtaagtgttaatcaatcaagagtcatggtaggatcagcgtatgtgagaggctgccagtgggagtcttgcttgctctcctacagtaaactttcattctcataagtaaaagcagtttcatctaaaatgttaaaaattggtccagaggtggaagtacctgccaccaagactaatgacctgagtttaatccctgggacctacatggtagaaatcaagaactgattccctcaagtgtgtggagtcctctgactccacaagcatgctgtgtcatgtgactgcccacaggcatacaggagcacacagtcatgcaaaataaatgttaatagaatgttttaaataaccaaaattataatgcagtaaaaaccagggctatgaatggactgcctctggaagagtgcttgcccagtgcactagcatgaagtcctgggttccatcccaacactgcacacaccgggtatcctggtagatgcttataatcccaggaatcaggaagtggagacaggaagaccagaagttcaagatcatcctcaacgatatgaggagttcaaggcagcctggattccatgagacctggtctcagaagaaaactgcaaaaaccaatcacaattataggtggtgctttggggctctaccattttttttttttttttttttttttttttttttttttttttttacggctggcaaagagctgtggtttgattttaccagtgtggcctcagacactgcctcgggatgtactgacaggtgggtgatgggaacttgtcagttgcactgtgctcttgtgagaccacgctcacatatgcagtctgtccttgacttggaggtgtcattatctagccatggcagcattagggtttcacagttcaaatctctgtgtgcttttattctgttctattggtctcttcctgttcaaaatatttaaaatgagtcataaaagggaaagaatattaaattatatcacaataaaattactgatgatgtgtggggagatctttacacttccacgtctattttaagatttgctcatcttatttgtctttatttttcccatcacacagcatactgcctggggtaaaatctcctcagaatgcatttttgagtaaagagataattaaagtacaatgaccaaggtgcacagagaacaagctagctaagcatagaggaaaacatcacatgagatgagcgaactcgatttggtgtatgggggaatgtgtgtgtgtgtgggggggggtctagttctgtagaccaagcttgcttcacaatcactcacataaacacccctgttcaccttcttgggtgctggctggagccacttaaccctgtgagacgaactacggtcagcaagcaaagcttagttcaaaggcaaagaggtgaacatagagccagcggaattgagtccgtttatataattcttgagcaaatctgcattgccatctgtctcccctcaaaataacttagagttcaagagtttacagagctcactcccaggctcaactttttggtaaatggctatggaaccctcatcaaggaacaaacaaacaaaacactctcaagttccggtgtgctgcaatccctctccctctgcagttgctgtgacaatatctgattcctggtattattatccagaagatggctgagggaagcagccatcccctgccaggccgccccagttttatgaagtgaaaatctggttggctgattcactagggaggaaaaaaggccaccagaaaaacaaaatgaaatgaaacagaaaaggctgtttagcaaagtggccaggagcaaccatgccacaatagtgcaaacactgcagagtgacttcgggacatctgttttgctattgggtctctcttctcatccttttatcttctattcttttggtggcaggatccataggggctaatggtggcatcatgtgggattttatgaataaaatgttcacccttcaagatctgttgctcattactatggcagcggaagaaatgtttatttttggctcacagtttgagggtacagcccatcacactggggaaggcatggacagctacaagagcgtgaggagttggccaaagagcatctacagccaggaagcagggagtaacaaacccttcactccgataaggcaagcagggggtgtccatttttccctctgattttccctgttacttggcctgatgtctcaggccacggatgggtgccacctctactaagggtagcttttctttcttgtgttaacactctaaaagttcttcaatgttacacctagaaatgtgtctcctaggtgattccaacacgagtcaaatttttgagtgaattacatcactgctgacattgtcccctttccaaagtagaactcagcagagcttgattcttgctaagtacatctccagcttccagtacatgtttccaggtaagctattcttctatcacaccgttatggtagtaccaacaaaatcaagtaaaacataaaaaggattttggaatctggagtatataacctgtattaatagctatcaataagaaattactctgtatcaataaaatatatatttagaattactttaaataaagccaaatgatttaaaagaaggaactatgtccatgtgtgttaaataactttgaaaacattcatggatttttttttttttttttggttttttcgagacagggtttctctgtagctttggaggctgtcctggaactagctcttgtagaccaggctggtctcgaactcacagagatccacttgcctctacctcccgagtgctgggattaaaggcgtgtgccaccaacgcccggtctattcatggatatttataaagttggtaaattaatgcccgaagattggggtaatgtaatctggcatttttcacactctatatgggaggaatacgaggcttagcagtgggaaggggagtggtgtgagttttcaggctatcgatctcctaacgattgctcaggcagtaatttaatcccagtgtgtttccaaaccatcacttgctgatgattttttcaagatttattttattactaatttttaagtgtgtgtgcatgtgcatgtgtgtgagcctacgtgtgtgtgtgtgtgtctttgtgtgtgtgtgtgtgtgtgtgtctttgtgtgtgtgggtgagtgtgtgtgtgtgtgtgtgtgcgcgcgcgcgcgtgcacgcgtgcatttgtgtgtgtgcgtgtgtgcattccctcagagttgataagagggcattgaatcagctggagttggagttgcagacagttgtgagccacctgacatgggaactgggaactgaatgtggaccccctgcaggaaggacagactgactcttcactgcagaagccacactgcaggaaggacagactgactcttcactgcagaagccatctctccagccctacttcctaataatttttaatgggattcttgacattaaccagggaaaggctcttaactttagtatttataaccataatgccaacatacttaactcatttcttaattaacttaggagcttttcaatcaatttgttattaatcttttgagagtaataaactaaaaatggtagaaatttgagatatgaatccacaaacaaaagaaaattagaaatcccaaaatttattttcatgtatcataaaaatattcaatgagaaaagctctatctaaagatagaaagccctgctgaccttttattattaaatgcatactgggataattattgcttttgaatatgctttctccctacctcataacaattgaacctacagataaaaaataaataattaaacacagttgctctgtagtaagccatggggaaatatccgtgcaatacaacataaaagggaaaaatgcatatattaaactagcaaagttcaaatgcttctacttttatgtacattaaatacttctaataatgagtatggacacatgttgctaaagaagatattgattaaggattatttagggcaaacagttcctaaataagctcacaatacctttcaacacattctgtaacttattcactagatcaagccctccattgtatgagggctacagaaagcaggttattctgaaaataacacagcttgagaggtttgcatgacgtccaaaggaaggaactagcattatgaagtggcgccaactctcggaagtcattttccaaagcagccaataggcactgcgcaataggctcaatgactgggcttggttcccagcacccacccctagcagctcataaccccttgcaaccccagcgtcagaggacctggtgcccttgtgtggcctcttcagtcacctgtaccccctcccttctacatatacataaaatataaataaggaataataaaaataaatcaaagaaacaaagcaaggaagaaagaaaccaaacagacgtgcattacatcatctccactcatgaatggccacccaacttcctgcaggcttctgatattacagagaagtgtgtgcaaggggtagagtcagagttgggtgttaagagaggcacaaggtagatctatcagagaaagagtggaaatgaaccagtgatgaccatctttcccccgggcatctacagttctcctcgacgtctttgcatcacttctcctgtggcttcctacacttcctggaaacaagggatggattctgtcgtctaggtgaagggaaggaaatcttaggcctaattacatctgacatgaaggaacccagatgtgcactgctcaaatgtatgaaggggggataaaaagttatagacacattcaagcaaatgtttcaaggggaacggagatttattgcctaaatctaataggaaatatgtgttgtgagccatctggtgagtgactcatatagccccatacattaacatctgttgtcatgttttcaaagtacagaatttcaaaactgtgctgatgagcctctgcatgcagtaagtttgccacacacagattaaaacaaaaagacctaccaaaaaaaaaaaaaaaaaaaagcttggccttgacctccaattacaattctatattgtgctgtagaagttaccacaagtacacaccaaaccatcactcactcatctctcacaagcttctgaaagtggataaatgataaaattggaatcaccacatttttagaacagttactgagatttgggctgttcccgtgacccaggtggcctaggtcatagctacttacagggctggggtgttatgttatgcatgttctggtttcctcccttcctcagagaggctgtgaggccttgcacacagatggaagtgtgcatgtgcatgcatgtgtgtatgtgcctctgtgtgtgtgtgtgtgtgtgtgtgtgtgtgtgtgtgtgtgtgtgtgtgtgactgaaagcacactcatgccatagtacaagtgtggaggtcagaagaaaacctcaagtgttggccattaccttgttggaagcagagtttcttactgtccattgccaagtatgccaggctagctggccctgtgttttccagggttctcctgtctccacgtcccatagtcctgcaggagtcctaggattatagactcatgctaccatgtgaactttatgagtgccctacattggagcagcaaatgattttcccattgagcaacctttccagcccccaaacgtaaggcttatcagctcccaagttgcctgccttccattgacaaatcagaatgtcattaaaatagatgcaagtgcctttggaggagggacaaagcatccatgagcccctgggtagtgacttcaccactgacttgagactgtctacatgaaccacttaagagaaggctgttttgtctcatggtgccagaggtttccatccaaagtaatccaggaacagcttgactcctagtggcgaggaagcaaaggtagaccacctatgcgatggagtttctcttcccccatttaaccacatgcaatatcctcgagcctttgcaaactttgccacccacatccaaggcagatcttcctccatggtcctcacagacacagccagggtcagattgcactcatctctagggagatagctggtaatcaaagttaactttcagttgtagaatatccaagggttttcaaaagacaatatgttattattttttggatttattttatgtgtgtgagtgttttgcctacatgcgtgcatgtacactatgtggctttctgcccacagaagtcagaagaaagggttggataccctataactggagctgtgggtgagccccagtatgagtgctgggaaccaaatgatgaccgtctataaaaacatcaagtgttcttatccacagtgctgctgtctctccagactcctaattttattttgaattgtgtgtctgtgtgtgggtggtggccgggatgtatctttgtgtatgtacccacagaggcagaaccagtagatcaccctgaagctggaatgataggcagacatgagccacccaacttgggtattgggaactgactctgtaccctctgtgagagcaatgtatgcactctttacccacggaatcctctcttcaggccctagtcaagggtttgtttttaataagaggaagccacataattcctactgcctagaatgtactcagcaacatggtaggacaaacagaggacagattttagtcctagggaagtgagcaaaatggaatggcacaagaatgaaattgctcagcctggaccatccgtacaagaaatcaagatgcctagcctaagagaaataaagatggcctagagggaagggaggttaactttagcaggagctgaaaattagtagcttgttcctgatagaagaatggatggagcaggcactagccttgaaagagaaaaataaaatagaaatcaaataatagcttctagagtcataggcaccattacacctctaaaacagaccatacatctatctttaactaagtttcataagaaatctaatcattttcacaatctgtcagctgtcagagtccaagaggcagaaatacacgtttatatttttaggaatttttttagaaagtcacacatttgaaatcactgtccaaataaaaattgatgctaagagcagcagcctacactgatggaaaccagcctcttccccaattaaaagcccacagctatggagaccctgccaagacaattgcaggcccagaggcatgttgactcttcagttttgggggtttgttttatagcctgtgtttatttttttttaatttattttacataccaaccatagtttcccctccctcctgtcttctcaccccctacctgcaccactccatccattcctactcctgttcagaaaggggaagacctcctagggggtcaacaaaccatggcacatcaaattgaggcaggaccaagctcctcccttggcatcaaggctggcaaggcaacccagcatgggaagtaggttccaaaaaagccagctcatgtcctgatcccactgctaggggacccataaagtaggccctctgcatgtgggtgacagttgtataatggggcttgtttctaaggtgctctgttcaacttaactgttgtgacatgatggggaatgtactgtgtattttatcttattgattgttaaataaaatactgtttggccaatgagacagcaagttagaggggactaggagtcaaagaggattctgggaaatgtagtagagaagtggtgatccaggcaggaagtgacatagcaaggagactcatatttaagagaaggagaaacaggaagggtccctttttcccctctgctcctgctccagtggcacaatgtgatccaccggcaaggagggacgccaataaggcgtccgataaggtaagtcttataaaatatataggtttatgacaattaagactgagctaacagatgagaatcctagtcattggccaagcagctttgaacctaatacaagtttctgtgtattcatttgggtgtaactcaggcgggcggctggcataaagctcacacatggcggtggggctcaggcggcttttggcagaaagatttatcataacataatggtgtcaggagtgggataaccccatgccccaaagttcccagacaaagagggaaacctgctgccacagcctaccctgtcgggcggctgagaggcatcagagcagcttgcatatgctcgcactgtcccagcgcttctggagtttagactcggcactgctgagatgctaaagacagatccagataaggaaaaacctctaaaggtttacactacatttaaaaatgtatgtaggcttgtgagagaaaaagaatcaggaggcaatagagtagccggttgtggtggcaccggtaggatttgctgaaggaagcagaggcaggcggatttccacagagaaaccctgtctcgggcaggggggggggagaaagaaagaaagaaagaaagaaagaaagaaagaaagaaacaaagaaacaaagaaagaaacaaaaaagaaagaaacaaagaaagaaacaaagaaagaaagaaagtaaaaataaaataataaaaaagccacataaagataaaaaatacacagaaaatctggatactttatgccatattgttgtctttaaattgtttgattgccaaggaaagacttaatgctgctaaaatacatttgattataaatgctactaaattaatccaacttatacattttaaaaatgctctaacttcaaaatttaagtttaaggacaggctacttagaaataaaggttttgtttgtatttccacagaaaataaaaagccgtggattccttccagactaatatgtcttgatcaagcaagaccccctgaagctgagatgatacagccttacagactacagaaacaaggacttggtcaggtttctatgttttatcatgatccctatggtatataaacatcgtccccaatcagcaggaagcagtttagaaagaacaacgcccatattcccaaatattgtttataaatgtttgttttcatttaaatgggattaattataaatgataatgagcatagtcaatctctttgtaaagaaaaaaaggggaataggatataggaatgaatattttacattggtatagatagattttcatttattgatacaactttaaggtcaattttgtgataggtatatgtctcctcttgtttaggtattgtgtttatacagatcctctacctataatagtcagaatttataattaggttagttaggttttctagatatacagagatgtatttgagatggttaggtattcttcaaacctttcaaagacctacagaaatatggcatttaaatgatttagggtttttcttggcagtgagacacaactgctcctggcacaccaattatgtcagaaaggaggatgggcatcgaagaaactcgttatggagtttgctttcaacatggcaagattagccatttgggcaagaaactgctcttgcctggactgtttgttgctgtataaactagacatgcaggactcacaagaaagtgactgctgaacttacaaaacaagacagtactgaagggttcctgttaaaatggagaagtgtgctagacacactgtggcctatgggctgaagatggatgccccaatgttacagaggaactttgggtgactgtccaggtagcaagttgtcctgtcaattctagagtttatatattatccttctgtggtctttgatatagttaaagacagatagttatggttatagtttccttcagttattataaaagataagttatccttcttttatttagacagaaaagaggagacgatggggaatgtactgtttatgtttatcttattgattgataaataaaatactgtttggccaatgagacagcaagttagaggggactaggagtcaaagaggattctgggaaatgtagtagagaagtggtgatccaggcaggaagtgacatagcaaggagactcatatttaaagaaggagaaacaggaagcatccctcttttcccttctgatcctgctccagcagcacaatgtgagccaccggcaaggagggacgccaataaggcgtccgataagataagtcttataaaatatatatgtttatgatagttaagactgagctaacagatgagaatcctagtcattggccaagcagcattgtacctaatacaagtttctgtgtattcatttgggcactaactcaggcgggcggctggtgtagagctcacacattgcgggtggggctcaggtggcttttggcagaaagatttatcgtaacagtgacacatctgcttaacctagttccacactcaggggtcaatggtgaccaaagtgagggagacttccctgttctaagagacctggaagcctcagcatagcaaggcagacaaaacagttagctacgggtctgttcatggccatcctcattcttcttttttttattttagttcaaattaggaacaagcttgcttcagatgtcaatcccttctctctctccctcccctccccccacctgcccctagccatcccccctccactcccctcaaaaggggctccccaaagtctaccacatcatcctggcccaggcctaggcctttccccatgtgtccaggtcaagagagcatcccttcacaagggatgggctctcaaaatcccttcttttttttttaagaccttacatatttaatacagtgcgttatccctgtacaaatggaaaaaaattaagttcaacatttctagaccaatatggctgttaatttttgtacaataccaactcaacacagtaaactaggatacactttttttttcaaagttgacagcacagctaaagtttccaaaaattcaaattatatatgtatatataccaataatggcagtatgttatgcaccaatagcagcatcctcattctttcccacgcatctcatcttcctgcttgaacaagaggtccctgcagtctgagactccatcaaaggcaaggacaattgattagctgctggttgccagtccacccccgccctgctgctactgcttcccccccccagcatggtagcatcatgcagaatcaggggcaggcctgcaggaacagtcagttccagatagttactgtgaagagtaccagtgcaaatgaggatcaatggccgacactactacggaatagtaatttcttaattcttattcaaatctggcaggcaagctaatataactcgatctgaattggccatgtgatcccgatggcatcctgctaatgggctgttcacttaatttatgtaatttttaaaaattaaatagccatattttaaatcccctccgtagtcctttggatggaaagtacgtgtttaaaagttacaatgcctttataaatctccatgatcaaagttcttgccttgttgactacattgccctaaaattttactttcttctgagaaaaaatattccagagagtcatcagcaagccatctaaagctctgctgagagaaactaggattgtccgttatgttatagacagcaatataatgctgaggctttatgactgcacagtaagggtgcctgctgccctacagatctctgccaagaagacagaggggaaaatgctccattcaataccaatgaagtcacgttcatatttgcacaccattataccagacacaagtacacttaagagatccttgtgccagctatcggtaactttgtctctatttaaaaatctattctcctgccctggcctgagtgtaaaatggcttccccaggcatttctgagttcagtctttgcaacagtcatacagacttctcacatgttactaacatgtttgctttttgggctctgaaagatttggacttgttctctcaattgtcttcagtctaggacaccattttggaaccttctgtcaagaatcagaataaaggggtgttgttctcccagttgtatatgtctggagggttactctcagctttcaatattgagctcttctctgactgtatttggggtttctatcagctgttctagtgtgcaagttggtctgtgaagttaattgacttgattgctaacagtagctgtacagtttggtagttaagaaaggatgaccacatgccaggaatactttttttaagctgcaggaaatatgatagagttaaataagttgtgttcacctctccgcccaagatcaacccctttatttcaaagctacagcctaataagctagctcagtcggtaaagtgcttaacacaaacatggaaatctgagtttgatccccaaaacccacttgaaaaaccagatgttgtgggatgtgctttgtgatcctggcactggggaggtagaggcaggaggaccctggggatcactggccagccagcctagccaaatcagagtcccaggtccccaaggtagaatctgtctcaaaagccaaggtggatggagcctaaggatcgtctgacacaagatgtcagactctgccttccacatgcaaatataagcatgtgcatttatatgcacatgaatgaacacagatgtctgcgcacacacacgtctgtgcacacacacatctggcacacacacagtcaactactccacgtgggaggacagaagtgatgagatgatgagtgcttctgaggaggagactggacacctaacagaagagggaaggggtgtgctcacttaactctggaaggaaaagtctatgtatccattaaatatgcgctcaatcaatcattcattaaaatacatggtaactacaatctacacagcatgtgaacatatgatatatatatatatatatatgaatgtgcacacaaatacaatgaggcaggtcctcagatgtgccattgcggttttctgggcaaaagagagttggtataaaggacagggaggggtgggaaggactgaggacaccactaacgagactggcttcatcctatccacctctaactgggatctctaagttactgagtaaggtttggttgaagaacgccacccccccacacacacacacaccttttcactctgactttcccgctgtcccctactgctactggcttgtcttctcacctgggctcccagtgctatttctttctacctatttgccattactctttctgtaaggacacacttgtgcactgctcctaagtacaaaagccttctttagaaacactatcccctagccatctgcggcctgttgatgaattccttgacatctgttgaaccaataagtcaacatcgtgagtttctgaagatattccttagttcattattatttttcaattctcactaatcttaggatgggtaacctcagtatgaatgcccagccagctaaacataataggaatctttccacctactctatatcagctaacatgaggcttatctactacaactttgggctgtttctttctttttttatgcatttgacaagaaactgggtttattttattttatttttagggtttctttttttccttcttttttatttaaattagaaacaagtttgttttatgtgtcaatcccagttccctcttcctcctctcctcccctgccccccaccaatcccctatcccatcccccttctgctccccagggagggtgaggccttctttaaaggggggatctttaaagtctgtaatatcatttggagcagggcctaggccctcccccatgggtctaggctgagagagcatccctctatgtggagtgggttcccaaagtccattcatgtactagggataaatactgatccactaccagaggccccatagatttcccagacctcttgacacccacgttcagggggtctggattggtcctatgctggtttccaagctatcagtctggggtccatgagctcccccttgttcaggtcagctgtttctgtggctttctccagcttggtcttgacccctttgctcatcactcctccttctctgcaactggattccatgaggtcagctcagtgtttagctgtggggctgcttccatcagctactggacaaaggctccaggatggcatataaggtagtcatcaatctcattattggggaatggaatttaaggtagcctctccactattgcttatattgttagttggagtcattctggtagatctctggatatttccctagtgccagatttctctttaaacctatagtggttccctctattatggtatctcttttcttgctctcctctatttttcccctgactcaatcttcctgctccctcatgtcttcctctcctctcctcttccccccttctctttctcctaactccctctcccctcatgtcatgctcccaatttgttctggagatcttctccctttccccttctctgggggaccatgtatgtctctcttagggtcctccttgtttcctagcttctctggcagtgtgtactgtaagctgataatcctttgctctatgtctaaaatccatttataagtgagtgcatatcctgtttgtctttttgtgactgggttacctcactcatttgcctgcgaatttcaagattccatttttttttttctgctgagtagcactccactgtgtaaatgtacattttctttatccattctttagttgaggggcatctaggttacttccaggtctggctgttacaattaatgctgccatgaacattgttgaacagatgtccttgttgtatgaatgtgcatcttttgggtatatgcctaagagcagaattgctggatcttgtggtagactgattcccattttcctgagaaacctccatactcatttccaaagtagctgtacgagtttgtactcccacgagcagtggaggagtgttcccatttttccacatcctctccagcataaactgttgttggagtttttgattttagccattctgacaggagtaagatggtatctcagagttgttttgatttgcatttccctgatggctaaggatgttgagcactttcttaagtcagtttgggctatttcttacactctttaagaaggcataaatttcccattttttcagagttgaatatgaggggatcaaacacaggctttaccttgcatgcatcattgccttagcaaagtcaacattcaaactcactcctggaccattccaaagctcatgctccaccacaggccacttgaacctgtggagtcagaggtcgtggtgcagggcattgtgggctgcatgtcagctaagtaaatttccctgaagcagccctctgccacctctcacattcttcccgaggaaagacaccttcatagtttcggggaacttatccaaactgtcagcacacaggcactcttcagcctaagacttcctagtcctaataaatatctgatttgggttaagaaaaaccagtggaataacccttggtcatcaaaaggtgctttagttttacacaaagataatacctcacgtgtacttgttaatttggaacctcattaagctatgattttaagaacaagcgaagatggctgccactgcagctctgtacggaaccttgcagtccggattctatcacatagctctccattcacgagctctgcagttttctgcttcatgcagagcacctgcctccaccttcttatgacgggctaggtttccctctccaaataagccacaggggattcatccttttcgaactctgttgaaaagacacacctcagttcatctttctcgccacataccaattgtatcaagagaataaaattgtcactttagaatcatagctatgaaagttttggacattttttagcagttttttcaatttaaattctttaattactactcatatttacatagaatgtttgtggcattctctttaatacttttaagaaactattaaataaagtagttgatgtgatgtgtttctgtccacttccagttttcattattatggtggtttctctgcctgattggctaaataagacaacccaatttgtaatttttttttaatcatgacacaactaattttgtcttccaaaaaagctccaaggtttattaactgcaatcacggtttactcgggtcttttcatcaaattagcctgcaacaatgcaattttcccttattttacttccatttcaagaagggcttaccactctgtgtcttattgagacaggtggccactctcctctaatttagggcatttttattacggtaataatttatgattacagttagagaaatttttaatccaattctaggcatccttttcctatttccttacacttggtaaagaatgtgttatctccgcacttgtagctgccacttgctcttgaaggagcacacattctgctgctctccagaaagagaagtttcactaaggatactccactgaagttcagacattttcgcttattccctggctttatttattcatgttcttcatatttacacaatacaggaagtttcagtgtgttgagggcagtagtataggtgggttagttttttttgttgttgttgttgtttggttttttttttttttcaatacttttcctccaggaagcctagcaaaatgaattcattttatttttgcctttctgtattttactctcaggagtgtgggatccatatagactctcataaatgtccacataaaagcctcaattctgcagaaccaagaaatattctgtagctagttcttagctcccaacttaacacctgcccctcggagggacgacaggcaaggaaaagcagcgagtgtgtgaatgggaatccagaaatagagccctggagatcaatagagtggccgaaaggacaggcacattctcaagggtcgagctcactgtatttctaagtggatcagagatatgatcgccggccactgtgaatggaaaggaaactagactccatcagagggagatgccagcactaatgcagtgaggtaatgctgcagagaatggaaagccgcccgcccgagggatcctaaaataagctcttcctagcactcctacccgaaaaagaacaacaagaggccagggagagaatttcagagtttcaaagccttgtgactgatcacttaacttttcctctgccaccaagggaactcataccctgaacagccagcaggttttcagaggaatgtaataagtgaattgctgacatcttcgtagtttgaagggaggggagtcaaaacgctgactctctgcactgacaaacatccaactgaggtggcacggacacgggctccaaccggatgcttctgggaaggctgctgaagcaccagtttcaagctcaaatgcctgggaaatggttatcgcagagggcttttgcacgtgctaggcacactgcagcagctttctctgtagagagcaactcagcagtctgtcaatcaaaggtcctgaggctgacagatcatggacacccatgaatgaccttgccaggccataagaacaaggcagatacaaagtggctgacagtaaaaaaaaaatctcctcccaaagaaataaaaagtcaaacaaactattgctaaaacgaatttctctggcatggctacctgtgcaacctctggtacaataccctatgctatatatctaaattaccagaaagcaatagaggtgatgtcaggaatcaatgggtactactggtgactttagttttagacatttccacaaagcaggtattcaatgatttcaatgttccagactgggtaaggacaacctactcacccactggccttgcttccataatagatcagctcctaataaaacaagagtaatctctaggtgaattccagtaaggatacataaagctaataattattttgttgtgtatggaagtagagggggaaacggaaatgttctttattatttgacaaaactgagatctgatgtggtgatagcctaacataccaatggtgtaaagtcagttttatcgttgtgttaaaaactcatggaacgatgagttcggtagtttgaggacttcttgtgaatgaatttctatcagctagtaagcctacaaatcattcgctaaaatttaaatagagttggggggtgtatagacaattaagtacaaagtcagttttcttcctaagagccatgtgaccatcagggaggtcttctatgtagctgggcaatgataatttaatcagttatatgaccccatcttttctctcactgggcttgaaataaaaacaaaaacccaagatgcacagtggtgttttctgggagattccattgtaaaagagaagatattcactcatggaccaaccttgaaagtgtccttcagtgccaaatcagacacacagatgggtcaacctggaacagagaaactgtgatccaaaactcaacttgtgggagtcttcacttgactacataagcatgagcaaatgtctttttttttctgttgctgtaataaaaaacaacttaagggaaagagaatttatttgagctcacagttccaggtctcagttcaccatgacaaggaaatcaagggattgggtgtctcatccagtcaggagaagagaataacaaatgcatgcatggtggtgcttggctgactttctcccctcttgtacgtccagggtcccctgcctagggaatggtgtcacctacagtgattagatcttgtcccgtcaatataatcaagatgtccagatgcccacatttgagttaatgctagattttgccaagttgaagattggcactaatcaacaaaccccatattgaaaattaatatttgtacgtgcacacaataaaaacaaacaaacaaaaccatgcatgtctaatgatattcttttacaaatctgtgtcctgatgcacaaaactgtccacttactcctaatttctacccctgaacctcagaattgtaactttctaggaaaaaaagaaacaacaaagaatgattacacaatcttatttgggaaaaaaaagctaacatatgggtatcaaggccaaaaatatggatttcaagataaaacatatggatgcccatatggaaaaaaaaggtttcctgtccagaaactctgctgttgcattttttatgcctatatgaatggtacagttttcccttcctctgaacaagactatctgcaggcagattataatgttataaattcacatgcaaatttacaaaatgctccactggtatcatctttattagattttttttattctcttaatcctttcatcacttaatagctcaacaagtaaatggatttttagcaaaatggtgaggcttattccaatcaatcctgtggctgatctgtccttagctaataaatcatagtttttttctcagactctcagaaaaaaagtcttctccttccgcatatttgcatgtatgggggactaggcacgcatgcacattcacactcatgagcacagatgcagagtccatgcatctgcatggctctaccgtgaccatggatgagacatctgcttctgtcaaggccccggccacttccttatcttcatccctttacatttaggagtgaacaaatgccatggggacagccaagcatgggccaattaggagataagatctcaataaaaagtttccatcttaatctcttatcgtttgtttataaagaccattttccccttggggggcacaagaaaaaagttaaaaaaggaaaacatttattggaaagaaaggaatccttagatttgaggccagttttaaatcagtgggttctttgtaagcacattttttgagttttaatataatgcaaactacaagatatttagcagtttcttgcagcattcaaatacctaacatataatttaaactctgtccttacgaaatgatattttggagtaaatttcatggtcagtgagtccattgttaggcagtctcccgactagcgctccatctggttggaagtttcaaaggtgaagggtcatactccctgattgtcagaccctaaaacatttgatttctatgaagagcatcccctctgccctgagagctccctggaggcttcacacattatctctaccaggagcagaaaacacagttaacaaaaaacatctctggcaaaggttagctgtggagtttaaagctctgagggaacatgccaggaacttctgtaagctacaattgatgctgagaggtggggtcatttcagaggactcctgattgcacaaggcaagtcagttgcagtcttcctgaaccagtttacaccagtggaacagaagaccatgggaagacactaaacccagtaagggcagagcactctccaactgatccatagcaagaacccctgcccttttccatccttcatttacactcagccattacagctattgcacctgacacccctgaattatttagttgcctctccaccacccaccctgctgggtaccgctagagcagagtgagagactggctcctctacactgtttccgctttactctctgatgtccagactcaccaccttctagagtgatctcctcggacaaagatcagccattaactgcattccgcctctgcccacaagcacaaactccaaattccaattccttagctacacagttaagctgactccaggtctggcccttagttaaacttcgcagctttttgttttaataatttctgtggatattatttagttaactactcactgtctgttgtaaaaatacacatatgcgtccagctcctgagattgggttctcagtgtcgctgtctaaaatgtcctctcatgcattgtcttccttaaattccaaaccagccaaccctgtgctaggctgtatcataatggagacagagtcctggacaatcagacacacttcctgagcttggggaacttgtaacccacccaagatccgaacccctctttccatgtccagaaataattacatgtactctatatcagatcagagtcaaaacgaagacattggggctcatgagagggttcttcaggtaaaggcacatgatgccaccaaaatgacctgagtgcctgcttcaggacccaactagtggaaggagaaaacagattctcttgagctgtcctgtgacttccacaatctactgtggcacagatatgtacacacacacacacacacacacacacacacacacacacacacacacacgatgataagagtaataataatttctcaaagattctagagagtgtctaatataatattaaggccccttctagtaactgggaataaagatgaatcttgaagacagcaataaaattaacttgaagacagaacaagagcaaagcacagtatcatgttttaaatatttcctcattcactcagtgaggacattcggtgtcccaggcacagtgtctgcaccattcttcagtggcaggcaagaagaacacaatgccaccacaaggcttttatggtcttacagaagtaagatttaaacacagaggcaagaaacatattctaaaatgcctgttggagaacactataatgccaaaaatatactgtaatgctaaggaagtataactgtccctggctatgctgacctcgaggagatgcatttgaaggaaagttgctatgtgatggcctcagagacataccatattgcaacaatcaaaatgaacctcaaattgtaaatgcaacacaatatttgatccaattaaaagagtttttgtgatctggacttgtctcaaaacaatgggctattcagtgatgccggaaaagtgttttccaaaatagacggtggtctccggttatagagatgctgaccttctgacctgggacagaagccagtgattttcattatgtttatactgtggatttttcccatctctgatcccagtttgccacattgagtatgctgctctgattataacctacattctgctcgactgtggatcaccctgcacaaaagctctaactacgggtgagatgagcaaactgcgacctggcaggaaatttcatttcacagactcaggagccaaaaggtacacagtcttccaaaataaacgccatgaagccaatgctcaatttctcttttaaaggtctttggtcataactccccgagtcaggcaatttgtcctgtaaatattctctaagagccggaatcaacgtgacaaacgcaaaagaaagcaagccagccagttcatatggtaacccgggcaaatcgtctgtatttactcagcccttccatcagacgcttgggtggaggggctgtgtttatctctcttggctgcacctaatctctttattaagtttgctgtctacagtggaagtagcagggtacccctccaggcctgtcttctcttgctcctaccttaacgttttattttttaggagggagaagagaggaagacctggggattagggaagcagctgggggagggagaggaggagagcaattacttgccaagccagctcctgttcaccagagaacacggtcaagtggtcaggaacagtgcggatgttaattagcaaagaaatgaggaatgagccagcattagccctgagactaatcaatgggaaaatcactccacacagccatttaatgaagtagtatacagctatttattttcagtctgttttatcctctacaatcccacaacagctgaagtcctcataaattaaaaaggttgtgtacgtgcatgtgtgtgtgtatgtgtgcgcgcgtgtgtgtgtgaatgtgtgcacgcgtgtgtgtgaatgtgtgcgcgcgtgtgtatgtgaatgtgtgtgtgcgtgtgtttgcatgtgtgtgtatgtgaatgtgtgtgtgcgtgtgtttgcgcgtgtgtatgtgactgtgtgtgcgtgtgtttgcatgtgtgtgtacgagtgcgtgtgtgtttgcgtgcatgtgtttgcgtgtgtgcatgcgtgtgtaagagcatgcgtgtgcacgtgcatcttttcaaagcctggcatagtttcgtcttccacacgtgtttaacctccctctagtcatgtctttccatgactaggatatgtcacatacgttaggttggtgtgaacacccattccatacaggaaatatgttctataaattatctttagacagatattcactagctgtactttgaaaaaacggtagatctttccctagaaagttaaagcagatctaacttctctaaagatagagcatatgactaccatccatccaagagcaagcttgtaaggcctgttaatgaagaccccctggtctctgggtttcatttgtttgttttacaggcagcactccatgtcagacatccaagacagaagtgtacggggtagtgagtaacgcttgccattttctcaggatcatgagaaggcacagtagtttagacagagtaagtctgtctctgggaatgtctcctttaatgctaattggaagatggcatctcctcagaaggataagcatgttctaccctagcaagttctgaaaagccaaaggaactcctcagtgagcaactcgtattcctcaagcaggaaggcagcttagagttggctctgtcagtgatagagatgtttctgaaatagtaagtgtatccaccctgacaacggacagggtcctccaccatcagacagaaaaattagtgtttgtaaagcatgtccatgtagaagtcagaacttccctctggagagcagtaggcgtcggcttccttgcttgcttttaacaagggattcagcatcccacttcaaataaaaggcttcccctcagcccaggcttccgaagagtccgagcacaagccctgatttcatttagccctcgccatctgccacgaggaataggatgcaagtggtggaattctgtccaccatgtcaagaccaatgaaatatgagatgtgcacacattctctcccaaaggcgatctatgcaagcacttcctcatacccataaaacctcaagctaaaatttcagcatatcaaagcttcaggccattgtgatttcacaaaaaagcagagttcatgtcattggatcatcctcttatacgcggctggaatggagactgagggttgtggtcatgtttaaagtatgccttacacatcctcagaacccaagaacacagcaggaaaaacaaacaaacaaaaaactccactaaatgcaaacctgggaaacaacagctcccaggtaattccctttataggttgatctgatagctcagggaagcagaaacaaagctccgagtgccagcacaccaacagctggctgggaaattgcacagactgttagagggagctgcagactagagataggtaatgaaaaggttagaaatgatagtttaaaaaagacaaatgactccaaagaccatattccttaaagcaccgaggcaaaacatgtttattcgatttgtttgttgcctattacaccaatgcttctttgggattctagagacccagtctgtcaatttttcagtttctgcacattcatggttgcttagagctgtttaatgcaaacacacttccaataagagatttcatgcccctaaattacacccagttaaaagcaaatgaaaatgtaaggtaaataactataatcagccgtattatctttctcttggcacctctcactttgcaggcatatttaaagacatctctggggccctatcctttttaacaagcaggagcgtgtttcctggaatattacttaagatgctgtgcagcgaacattacacaggttaaaatgttacctagagacctaggaagtagtgcatctggagcagagaacaccccccccccaacgcacacacagattttggaatgtctgagaagataaaagaacatttgctgtggatgggggatgaaaggggacgagaagaatttaagtttgtctttcatgtcaaggttcattgatcagctgttgtgaagaggaacaaagtctgaagaagtcactctggaagagatggggcggggtgcaaagggaaggattcacggtgtttgccatacagagcaagtatctagtgcaaatcactgacctgcccctgagggttaggagccatgatggagaccacggaccattttttttttttttttgccatagataagattgttttggtcaacagttctcagactttggggctctgaaagatatcttgaaaactgtttaagatgcagagtcctgggggcaccctgagagatttgggttaaaaaataatgaggagttaaaagccatcaggcttagccaagcctgactatctgagtttgatcccagtacccacatggtaggagagacttgggtcctgcatactatactctgacctccacatactcaacacacttgtgtaataaaatcttttgtttttttaagtcaaataatctgcattttaaccagagccacccataagtctgtgggctgcaatttgtgggggggatgtctctgtagtgttgggagcacatgcatttgaaataaaagaacagatgccttttatagagacttttagcccctcacatagccttgcccactaagcacacagtgatgactgaccatcaagccagtaggaatagagctagcaaggcagcagggtagacctgggaatgaatgaatggcttaaatgtgtaagacagctttgtgcatccaaaatacaggatgatggtgttctctgtaactgtgacccaagagttcaattgcgtccactcatcttcaggaaaactagcaatcatttctttttatggggtgtacagtttctgaagaacctggtcattttaaaatgtgaggtatcacctctctagtgacagaggagccattgtcaggaagcctggcagataaggagaaagagatgggtccaaggaaagtcccagcctgtcacctaggagcagctcagccttgagtagggccttcctagtctcctaccagtaggtattacacacccacacaatggatttgccccataaccaagcagacttctgcacaagagacacaaagccaccacttgatgagacgcaatgcaacagagctgggactttagtgcagacccaggcctctgggaaaggagagtgaaaggaggcaagcagagtaatttctctgtcaagccaagcatggaggatctatttcccacattaacttctcgatacaacttacaagaattagtggccattttaagtcacttgcgtgtatgtgtacatgatcatgtgtgtggaaaccaaagatcaacctcatatcaccatgcacaatgctagctacatgtttttgaaacacagtctctcattggcccagaggtcactgagtaggccagaccggctggccagtgggtcccaaggatccacatgtctgtctcaacctccctgtcagtgaggttctaagtgtgcacaagcgtgtctgtctttttgctgtggcgctctctggaagggtaggagaagacttggcccactcacgttggtgttcaatccatgaccagcatgaacaaggactggacaaatgacctctgacctctgggtatggatgttcaggtgtttccatgtgtatgagcacatggctcagtgtgcttggtggaaaatcacgttgacctagtgtttaacctcatccctagccctacacctattattaagccttaatgtgacaagtaggagtcctgttttatcacgcagtccccaaatgtaagcgctttaagtagtggaccaagggcagattgtataataaaacttgaaagcacagactcaattgcctcaagttacgcctagggctcgggcataatcgtaatacatggtgtgagtgtgtggctttcaattggaaagtggacacttgagagacactctgggacacgtgactgcatacagttcccatgaagctcagataatgactatgaagaaaaatggcagaagttagaagtgctctaaggatgtccccagagcaagtgacatgagcgtctggactattcatacagggaccggcgagatggctcggtgggtgtaagggctttgatctgagtccaatccctgggacccaccaggtaggaggaaaaaacaatttcctgcaagttgtgctcttacacacacacacacacacacacacacacacacacacacacacacacacacacacaggagataaccaaacaaatgtaattttaaaatattcacgtggtgacccaaatttctcacttacaagctcacagatattaaggcagaggaaactaacgctagctgataagaaatcccagagtcagtcactggcctgtggtataaagggaactgaaaagacatgaccaaatttgaaatggccagaaaaagccaaaagctgtgtcgttcatatttgtggatgagggattcgagaggagtttgattggagtttggaaatggaaactcccttggtttgtgagtctctgtaggcaaagtataccaagttcacctaacaggaagtattaacacccctcacctgcttcctgacatacagaattctgtcggactccaagagccacttctcagcatataactctggtcactgctactctttgtaaaatgcagatgtgttctctgcatttagtttcatggctacgttgtccacaaaactgtgacagcctctcaaggcttcctgtcatacctaaggtccatcagcaggatcagcaggaggttaatctccaaccgctgtcactcagacttctagtttcgggaccatccaacttcctctgtaccaaccgtgtattgtggtccagagcatttgaaacataaagatgatgggaaacaacccttgacccccatgtctgggacagaggagcaggagcaagcactggttaacccctccttgatcctcagggcaggggatctatctaccccacacacctccacagtagttcacactggagtcttgtcttcttctgagacccatcggctgaggaagcctgaagcccttcagaagcacagtgcccaggttatgcccacagcccacagaaccatctgttcaaatctctgtgtgtttgtttgtttctctgtgtgcatatgtttctcttaactctgcaaaatccacctggagtcctgtgtgctccttggtgtatcttagcactcacatgtcaaaggcacgtgccattacagcatgtttaagtagtgctgtgccatcccgcaccacagcaaaactttgtccctggaaaggtctacaagagacattacccaccacgtaaatgccctaccctgttttctcaatgacttcttctagcccttgaaatagcttcctttttaatcagaagaggggtttttgctttaatctgttttgttttctatggagctctctttcactcccttcttccttccctccctccttctttccctccctctgtccctctatttgtctctgtctctctcttcctccctctgtctctgtctctttgtctccctctttgtctccctctttgtctccctctctccctccctctctctgtctctctctgtctctgtctctgtctctgtctctctctctctctctctctctctctctctctctctctctctctctctctccccctgtacaggatgactacatgggaaagaataggtcatattagactagagatctgaggcagtggttttcagctcctcatacccagccatgcggagtagagagtgagaataagactcccaggggaacaaaaggtaacaaaatctatctggcccctgtggcctgtctacacagggaaaagttgatcatgctttccaaaattcccagtgatgtcaaaggggaaaaatcccaccccaagactaaaaagtgccttagagaactgaggctaaagacagcggatgtcttgattaaactaaatgccacttacaagccattttcctgaactaactccagggctagagacagtgggtccactgtaggtagcctggatccaaacctccacttgaagcacattactgaacctttgggcaatttggtctcctctcttacaaagcaaagacaggaactgtacataccatgcaggattcctgtgagcactgtaggtgacttccctgaagactccagcacaaaacaggtagaccttagtcacagtggtcagtaactcttatgaaaaccaaaggccaggctacacattgtagacctcactgcagctaccatcattattcagatttgatgtatacactatttcgctgtatctaatgttaattttctaacaacccatataacaactattcagagctcatggctagcaggctgcaacttccattcctaaataaactccagtgattctgcctacagacaagttggatctgcccagggtgagaggcttaatcaaaccccttgttaatcactgtgggtatcagggtcttccaggtattctgcaatacaggatgagattatgaaaattaaacaaacatcattaaaaagtgcactcgggacctgctgtcagctgaaacagcttcctttctactgaagatccttatttctcccttcccttatctctttactactgggatgggaagtttaccaaagctggtgagctcaggaagccatcagaggagaggcatcccagggatgagatgctaggagaagcacagcaggtggaccaatgccagccactcccagctgccccatgattgccaagcaagctcatgttccagaaatacaaatacattatccatattctatcaacctgcaagtttatgtccagacagacacactgggatgctaagcagtttctaagacctttgcactgagcagggtcacagagaatgtatttaacataatgctaccctcatttgaaatactcaaggaaaattcctcaccccaaataaaatgaagggtcaggcctgaggactgctggaaacatccatttgtatgtcaagcaccacaacaggacaacagattctagtcaaagaggagttgctgcagagtccctacccaaatcaatagagggggttcttttttttctttgtgttcttataaaggtaggttggctgaacataataaagaggttagggcccctatagggagtgaaggcagatgcaggagtaacgtctcaaacacgctgtctgcagagaatggctgcccaccactcccagcatgcactacatactccttccctgaggtctcaaggcttcaacctatctgccagtcccgaatccaaaactttcatcattctccaggctccacttttgctgctcattgagacagcctggctcattcctgtctcaagacctttgctcttctgtcttggtctgtcaagaacatcccacactgatcctcatttggtgggctccttcctattatccagacatggactcaaaggtcatctcttgaagtgtaagccttccctaactacccagctaccacatcctcatgtcttcttagcacccactgctagacaggggtccaccaacgtatataagacaatgctgacaatagtgttccaggtcagcaagcatatgaccccaatttgtctccttcctaccatggctccaacctgggcaacagtggttgaacattaggggactcccaacagacatttgtttatttaaggagattttaagacaatgttctatcttaagctttatattccagaggagtccttgttttaaaatggagagtctttccactgtatatgctttgaatcatatttattcacacacaaaaaagcaaaaaaaactgtccaagtctggctaaatataataagtaaggtcaacaggactgctgatagttttgtatgtcagcatcatgacaaagtagagagctcttctggtggcgtcttagcccgtggtgcagggataacagaggcctgactctggcatggactctcatgggccatgggctggtccagcatctctaatgtatttgaatctgtaatcagtacacagatagtcagcaaagctcagctttaagcaaacagtggagctctctggactccctgaaaaggcaccccattttctaccaccatcgacacactggccagccttcttcaacagagagatgaactcaagactagcaacactctagaaatggaaagcaggtgctctcagcacacactcaacacaatgacaagagcatgtgtgtcatacatcagtgatccacctcaaataggaatgcctaggaaggcacttggcagccaaaaggtacaatgataagagtgctctatagccactgtgttatggtatccactacggtatgaaaagtgtgagacactaaacacaccattctcctcttattagttcaggggtttgctttgttgctttcaatacttgaaaatttcatatatatacatcatgtgttttaatcaaatccaccagcacttaccctcctctagttacttcctgaaacaccccccacttttcaatccctatatcatgtaccttttgttttgtctaaatgctctgggtcctctttgtgctaccaacagatgtatgacagtggggccacctaccgggacattggcagctcctcagaggcctcatccctgaagaaagctactctccctcttctagaagccttcagttgccaggtgcttctcagctaaggatggggcttcctggaccctcccccacccatgctaccatttgggctggcttgatattgtgcagatcttaagcatgctgtctcagccattgtgagtcatgtgtgcaatcatgtcttgaacacactgtcttgttgcagtcatccactggctcttagaatctctctactcctcttttccatgatgaaccctgggccttgggaaaagggatattacataaatatcccatttggagctgggcactccacagcctcttattctctgttatccagttgtgggtccctgtgctaatcaccatctactcttaatcacagctactctgaagatggttgagagataccccgatcatgagttttgggttcattgccttttaaacataaagatattctttccaaataaagaaccaaaatgaagtgccaaacacggattcattgaaagcacacagaaacacatgtaagtgtccttggttacatgttaatagctggctactgtgtaagtgtgtggagggaacatggatgtagatctcatctggaaagctgagacggtggcaggaggccctgtcacgtgggcgcatctccatggatgaaacactctgagtaggtagccctgtgtgctataaactgctcgtgcagcaggactgaggaaaggcacggcctggccaccggctgttcctgactcagagctgagagcacagcggctctgcacctgttcacctgatggtgaaggaaggaaaagccattaccgagtgacaggagacaaaaaaccaaactccacttcagcaactcatcctgtggctggtgattaatctcccactcccacagcctggtgcacattaaccaggtaattaataatttctttagggattccggctcggcaactgttttatcaacctgcacagcattaggagggagaggctgcttttgtaatcaaaagtctggaaccaggaaagagccatagggagtgtgcaaggcttcgttcagagcaatgtgtgacactattttgaagaaagcagtatgaagtataaagttgctgccattggccaacctgaagagccagggggcagatcccattaaggccctgtggtccctactagcagcaggagacccgtgggtactggcatacccactggcttagaatcacaagctcaaaccatgtatacaaaacagaacactcccgacagagccaaaccctgtcacgccagcttcggataagcgttgaccctcttactccaaatttatagtttccaaaatgcatttgatttagatcaaaccagtgactcatttcttgtcctgcaagaaagtctcattcacattcatccaaggggagcacaaagatgactgccaacctctgtaagttcccctttgcaaacttccttctctcctatcaaaactcgccccataaggagaagctgaaactccctttaaatgaattttttccttaagatttcaagactgtgaacaaaatctcaagcataataaaccaaacacagtgcttttaaaaagtctcaccattaaaattccaaaaccccgtgttctctcctaatgagaaaaacactgtattgaaaatattatacatttctctcaactctatccagaatgctatttggctagaaaagaaccaagggtgtatccattgcagttgtaatcacaggggtctggaggcaggaaacaagggtgtatccatcccagttgtaatcacagggggctggaggtaggaaacaagggtggagtcttgccattgcctctctacattttggtactgggttttccagctccagtgagagacattacaatagacaaccaacactcagtagcatttagctccttgagtgttatgaacagctgccagagactggtcaccctacctagacccaaaggatgcatttttccctgcttggatgccccagtgtcttttcactgtgcatggcaaaggtgaaacaacacttggggctgggtgctgaaactatgaataagcttcaaagcaaacctaccatgttccttaaaataccatagcactagaggataggcatctccctcagcagatgccacaccttaatctccctaggatagcctgggatttggtttttaacccgattctgagaaattgggggtgtttgttgtaaccttgtggtggtttgaatgagaatggtccccatagactctcataattgcatgtttagttaccaaggagtgaaactgtttcagaaggattaggaggtgtggccttgctggatgaagtatgcagctgggggtgagctttgagctttcaaaaaccaaagccaggcccagtctctctctctctctctctctctctctctctctctctctctctctctctctctctctctctttctctccttccttttatccatccctccctttctctccctccccccatctctctctctctgctacctgaggatcaggatgtaaagctaccagctactgcttggcatcatccagtctgtctgcttccgatgatgatgatgatgatgatgatgatgatgatgatgatgatgatggcccaacctgctacaactgtgagccagcccccagttaaatgctttcttatatgagagttgccttggtcatggtgtctctttacagcaatagaacagtaactaagacaggtgccctatgagtgacacccccaaagtcgtcttactctatagaacaggaaaatgaattagacagagtaagagatccaagacagacaacctattaaaaccctgcacaaaatgtgtgttcacacagaacagtcaaaactggagttatttagtactttccaacaatactgagtacatcctggggaaaagacaagctgttacagggcacataacccagataaaaacaacaatgggacacctttgtgccttagcatttactttctatctgtaaattgagaaatatctttacattggtacacatattatggaaagaatgcatgtgtacatacatacttagattgagacagagacttcaaaaacaaatgtcttgattgtcagcagcaatctgaagccagatgctcaggagacacacacagagagacacacagacacacagacacacagacacagacacagacacacacacacacacacacacacacacacacacacacacacacacacacatccttgacatgtgataggggaatacaggaatgggtattttgagaaggggttgactagatcctattgcaggtaagaaaactgaagcacgtgtcttgactttgcagagcaccaggctcttcatatttaaaaccacagtcattagacagaatgcagtgctcaatggttaagaccagttactgtatttgcaaaggacccacgttctgtttctggccttcacatagggcaattcacagccacatggaacaccagatccaggaggctctgatgccctcttttggcttctgtgggcactgtgatcatatatacatactcatgcagacacatagatgatgtgttcactgtgcatatgttcatgcacacgcacacatatgtgctacaaacataaaataaatctttaaaacaaaggtaatcatttttttcattagtgctcatgacaatctatgagatcaatatacatgtgaatatcacaatttcttaaacttccatacttatgaagtctccgtggtcaagaacacatgcaatgtagctcccaagatcagagctctcaacacaggctctgcagtccttctggattcaaaaggtaaaggctcaaggagcccctggtaagagatgcaccataaaacacactgtggccagcacctagtggaaccctgaaaagggctgtcgctgccaggacacacatacattcccagagcttgcccagttgtttttgctccctttgatagttagttaatcttcattgtcaagtgggatcaactaagaggcacctctgggtagatctgtgggggtaaattcctgaattaactgaaagtgtgtggggtgagccttccatagcagcttagatatacagtgatctgaaggaaagcctcattcctcattggtcacagggcatcccctatgtcactgctgtccttggttgacaacagatctctgtttagccttccagtgtggattgaagatcagtgaggatccaggaatcctctaagctttcagcaacagactatggctgccaatgtatgggcatggactgagcagctcctgggtgttgggtctgtgtacaaatggcacattgtccatatcatgtaagtccatttactaaatcctataaaacacacacacacacacacacacacacacacacacacacacacacacacacacacaatctctccctctctttcctccttcccttcctcagttctgtccttctagagaaccctaactaacaaacagagcctcctttaagcagcacaatctctgttcaaagtgcacaggatactaggcatttagcaagcattggcaggaatcgtatgtgttgagctgaggtcttgggaacagatgtaattaagccagaagcatgacaatgtgatatactcgctaaacaaaaggtgaaagtgccacatggacaacaacaaacaaaataaattcataaagcaaagttgaaagcccagacaaatgaagagccctgggttagagtcatgacatctggcatttcccagtgctatgaaaacttggtaaagcaatctcaaccatacacagttcttttcctcataaaaaaaaacacacaaggcaataatgttaacctcagagggtcatcatgaggggtaaattaatatcaacaagaaaaaactattaaaatataaagcattaaaaacatgtttttatctataacagtgttgtatagaaacacaaagtctctgcctctgtgtgtgtgtgtgtgtgtgtgtgtgtgtgtgtgtgtgtgtgtatacattgacacacaattcataaatgatcagacacacacacacactgtaagtttcttctcccacatggcttgattccaaagccaactaaagcaagacctttacaaaccagaaacagtattttaaaataactacataccatctcagccactaattatctttaggattctgttctctgaagctaattgagaatgttcagtcctttccattcattagttttattacaagcactccaatgaattaaaggagaatccgtcatcgccaccttccttgaaacttccaccactgtcactaaggccttgaccttgccaaagcaattcacattaactcagcaaaagccataggcctggacagaagatgaaaatttggcatttttaataagtaggacaccattgtgtgagtttgacagaaaggtcttatactcctggtgtcaggatacggtgcaggcaatgcctctcatgcttttgagaggaatagtgtactgcctcaaccgcacagggactggacaagccaggagagatccaaacatgggtggtgaagcactccttaacagggtggggagtctgcggaaaactcacagatctgagccctgcaaagatgaactacagggatagtcctagagcactgtgggatcttcagcgcacactgagagcactgtgggatcttcagcacacactgagagcactgtgggatcttcagtacacactgagagcaatgtgggatcttcagcgcacactgagagcactgtgggatcttcagcacacactgagagcaatgtgggatcttcagcacacactgagagcaatgtgggatcttcagcgcacactggaggaagggcagcgtgtgcttcaccttaaactgctgctctgtgtattggctgctttactgaatggggtcagctatccacatagcgtttcctatacataacacacttacatacatttcttgccacttaactcatcaatgaaaatgagcttatctagctggtattttaattgttgttctacagttgagaaagaaaatcaaaccaggcttgggagaagaaaagtaaagaaggaaagtaacgaagaaaagtaaaagaagaggacctgtatgggcatttagtagcatccctattcataactgcccaaactcagacatcttaaagtagacaaatagatgaattctgtggataaatagaaaaacactgtggtacatccataaaatgggctattattcagtgcttaaagcatgtaagccatcaaaccatgagcagacataaaggaagctttagggcatgctatcaagaagccatcttgaaatcaccaactacctactgtatagtcagaaccacatggcattttacaaagacaaaactgagataataaaaaaatagtagcagaggacagaagttggtgaggcaaatttggggatttttagggctgggaaagctgctttacatgaaactccactgttggacatggaagtataagggtaggtaaccgtcattatatgtttgtccaaactcatgcactatgtgaacctggctacagagcatggatccgagtcccagagatgcagcagtaccagcttacccatgacaacagacccagcacactcgttgccagaagtgagcagaggggaaatttccaacttcctctccattgtgctgagaacgtcgaactgttctaaaacacatgataaatgaaagaaacaaactacacgctggagtacagaccagggcagagcacagacatggtgtagcatgcatgccctaccccaagataaagaaagaaaggcaagaagaaatttaaaaaattaataaaacacagtatattccaacagagtttggtggaaatgaatgacataaaccaagtgtgtaagaatcaagtatcccctctcctttttaaactgtctcacctcagctctcacagggtggatttattaacaaatatttgtactatttcctggaaaggaaacatctttttcaaaggtcgtattagcagtgcacctgtatgtctgcttgccctgacatggttttgtatatttaatattgattattatatgagcttcattacagaaacaaaataaaacgttacttacaaaatcgctctctcttccctactataatttaaacccatctctgagaggtcattttttcaaaccattagcggcccttcaattttctaaaactttcagcttttctcagaaagagtgctcataaaatgcctcagtaggaaagaggggctttgaccatgtaaacacatctaattatcatctgaaattacaaaaaaaaaattgtacaacttccagaaaggctcattgaagtagaagcaaaaaaatggttttctcagatgtgcttcctcttgataattcctttatcaagacagactttcatatgttatcactgttcccgccactctgatgacagaatggtcatggtggccaagggagagaggtcaccatctcctgtgctgtgtcagaccctggctactatgacagacagggaggttcaaactttccatcacctgtccacaagtcctagactccaagacaggagagatttgtcttaaaaaatgctgtctcccaggactggagagatgtctctgacagggacgtgcttgctatgcaagcataaggacctgaatctgaacctcagcacacaagtgagaagttcagtgtgatggtcatgcctgctgggtcagcagtaggtggggtgaagagagacagatctgtggggcttgctggcctggcaggctaaccaaacccagaaatctacatttagtaagactaagagttaaaacctagagtgggaggagcaacagagaaggacctctaaaattaacatctggcctctgcaaacacacacacatgagcacacacacacacacacacacacacacacacacacacacacacacacacacaaatttggaaaagctcgggaggagaaaagtcattgagtatttaaaatgacagccacccttttcaaacaacttccttacttggcattagttgctttacctggttgtagttgctggagtcctctaattctcctagatgttatcatgtgatttgtggttcctggtcacctaggaagctatggagccttgcagtagtttcaatgagaaatgtccccccacagtttcaggcatttgaacagtttgtccccagatggtggagctgtttggggcagtctaggaggtgtggtcttgctggaggaagtgtgtccctggaggagggtttgagagcttcaagactagtaacatgccacttagtctccctccctcctttctccctccctctccttgagtcccagcttgtgcttgcagtacaaggtgatagtcgccttcttctacccttggcctctagttcctgctgcctgatgcctccactcaaccgtcaagtcgaatctaaaactcaagctcttctctaagttctcttggtcatggtgttttattaccacaacagaaaggaaactaatgctggccactggttttggaaccagttttagaagagggaggcaacaaaggggtgaggctacagtcactctggtttggcgtagatgtccaagatccagaggaccccacacctcagtaagcatgaaggggctagtgaaggagttactgagaaaaccaagtaccacataaggctccctgtctttaaagggggggggggtgcccacgtggtagagaggaggatcgcagtaagacacacagaacaaatgagtctgcatgcaaaacagcagaaatgtgtgtttgtctgcacagagcaaagtggacaggtattacagcaccacatatccagggtgccggggtcgacagctccaaggagctgcccgaggaggaggaccagagaaagaacaccaaagtcactgcatgctgatactgagacaagacttcagtaccagctacttcagcacacgagagcttgtgagaagtgagcgtggcaccactatgccttttttcactctacttgagcctccccttctaaagggaacagccagggacagcccccttgttggtgtgcaatgtaacattctctaggtaaacttggttggtctaatgaactatttcccgggtagacatcagttttcctttacctcctttcttcagtcacccgtggttttcttagcccaggtgtctgtgcgcttgcctgcccgtatgcatacagccacccaccttcctctcccttacagccccaacttgagcatctgcctttgatgtaccatttgtgccactcgtcagaatggaaagatgagcttcagagaagcaattgagttgagagaatagagaggatgacatcacttcaaatgtgagctcaccagcatctgggcttttcaagttttcccctgtgttggcagccaggagctctctaccctgcctcaccatgcatgccacccttgcttcacaccttttgatcaccccctttcctgtgtcaccattcatcacatccccacacatgcaggtgtgtgcacttgggaatctttaagctcctctcactcttggttcacaagcccccaagcaaaagtcaggaattggttagcatcagctgtaagtatcataatagagataataaacatttatgtgggatgtgaataagaggaattaggaggccctggaaggagaacttttggacatttgctcatgttctctgtggcactcccaagacaaggtaccagcaccaagaaggccctgatggttcccaaatcccttctgtatttgtcttcttgggtaaagtacaaagtgtgatgtgctagttttctctttccccacctgctcatgccacatacaggtgaaatatcctgagcagtgtgtgacatcactggctccaggccttcatgccacacccacgtgttctaagcactcacagtggggaaaagtttgtttgtgtcatagtgatttgaactcacaccccagcagccactgccctggtcttccctctctatccaactcagcaccccaagatgcttggtgatcaacagctgtcactgcgttggttcccaaggctgcaatctgggctggtctcagccggaattttctcctttgtgtgtttgtggcttcagatgcccgttcatatggacaagcaatgcctggctgagaggatttctctggccttgttttcttattgtctgttcttcaaccccttgtatctctatatggctccatcgtctcactgctgagatttgcactgaacaacgctcctttgtgccagaagctattggttcaaatgaatccccagtcagatgagtttcaagagtccatccatgtaatctgggatggaaacactaagaggtacccatgtacctgaatgtgtcactaccacaaagatcaccaaatgtgcacgcatggctgtcgcattggcttcttcgttatctaaaagagaaaaacaggctctggggagatgattcagatggtaagggtgcttttcatgaaagtgtgagaaccacagttcaaaccccagaaactatgttagaaggcagatgtgcagtagctgttagcacatcatttccacaggaagatgggagatggaaacaagaacttccctcaagttcctgggtcatcaagcctggcatatgcagcagggaagggagacaaaaagcaaagatattctgtctcaaacaatagaaggcagggacagatgttggatgctgtcctctgaactacacacatggactgtggcacaaaccaggccccattcacatctgcctacacctgtgcatgcacacagacacacagtttaattttataaaagaaaaggatttcccatttcatatctgacagtgctacatgataaggggtagaaagagatttgcatataataaatgtctgatcctagcttcctagcttctgggatcatagacttgagccatcagcttggcatatgcaggactagagatcacacccaaggctttgtgcatatggggcaaacacttgcccatctgaacccatccacagcttataaatactccatgaatagtatccctggtccatcccaaagcacttgcaatttctggtacccagaaacctgtaagcccttcccgatggtatgtacccctcctataaggtcgggtcttccagtttgagcctagcccagtgtctagcatttggcatgcccctgcaggtatgtgtttggtgactgatttatgaccaaaagaattggaagactgtctccaactactcacttctacagtacatggacagattgaactatttcacaagaatctgtgaggcgcaaattaaaagttatcaaattcaatgtcatgagcagtcacagcagtctggagttcatcttcacctctttttaaatatagtatatgtagcaaattccccaaaaatattttgccagatttttttccctgcctcatttttaaaatgcaggcatactataagaaatatgtaatccatatgtctctgactcatttttacccagttcatcaaaatgctgttttcatattaaatgtcaaaatgccttttacgtctttatatatgagcccttttaagttgttatttttaaatgatattggaatatgttttgcctcatttaaaatcttctgaggcatctataatactgttccaaacaccagcttctgggacagttcattttgtttactcctgggcaaactcccattttcagagatcaattctagcaagttcctaaattctcttcttcatttcaaataggttagtgaaagttgcccgcatagagaagatggaaaaccaacatatgatttacagttcctttcaaagggatacctagctcttttgtcatctccccccccccaccttgactctccatggtactgggaggagctaagtctaatgtttatctatctgtaagggtcaggcaaagggcaggtcatttacacagggttagaagctgttagcttcttctgtgtccaactgttaggtttacacttggagttcagcttccaccaaacctcctccctctaattgcttcactccattactattactattttgtcaatgttgttgatgattatgttgttgatttcactgtaagaaaaggaattttttcagggttcagaatttcacaatcaaccgaatttgctttgtagtctaacaaagtatttgtaacaaagcagaggcctagatattaagaacaaatgtaatctatacaagtcaatactatctatgtaagctgagaccttatacaactctgaaaatctgtctgagatccacaatttcagacgttatctgttaaattctggactttgttgatcctagatacgaggataaaggagcccccactgtatacatctcagatttgatagtattaagtaaataatatagcatttcacgtagtagaaggaatgttggtgatgatagtgagatgtggagactgagaaaatacacaataaccaaatccaccctagccttccatttcaaaataaaagtctctctattgagacacaaaaaggagcctgtggggatgagacatacacacacacacacacacacacacacacacacacacacacacacacacacacacgaagggggagtgagggagagagggaggaagagagggagggagggagggaggaagaagaagagggagagggaggagacctatctgccatggttctaggcctctttttcaagcgcctcagatttgctgtcctcactcactgagtcaaggctctgagtctaccctttgtagagaaaatttgtcaaagtgctaatggttttagaagcagcacttcaggggctgagctgagaaaagtactcttgcaaagactttggtgaagacagcaaccacacagctagaacattcaggcctgggttgcaaaatagctcggatatttaaacaccaagcagtataaattctgtgccaggttagcaatatttcccggtaaacagctctcttgcttaataacttactaacacaggacatacatactctttttatccttctcctaagaaaggtaaggggctgggggggtaggtggcaaacaggagctcagaacagcacaacaaggtcccttctggagaaatcagacaagagcaacccgcattctgtgtgtgaattagtcttgcagagaggagggatatcatgtttctgtaggagcacagagctgacccgagtgttaatttgaattttaagcagaaccaagcttttgctcgggtccatcccacctgtcagggtatggtagtataacaagataattactttctcttctttcaaaatgccagacacccaagacagacttccatggaaaatgaacacggcacctgtattaaatcttattctaataagtctatgactgagtatccctacacgttgttatgttattcatggaaatggcagcagatgccacataaaccctaaagaaatgtaggaaggtagaaccaggcagcaaatgaggaattcagatctgtatctaggaaaagctttggcagaaaccagatgaacttggatatcattcctctacagagtagtgcttcctttgtggaagacgcaaggttgaaacacaaggtcattagagaagggagacagcaatgaggaatgtgtttgatagctttctggttgcttaatccaaacgagtttaggaagaacttggtattgaccccagccagccatagcctttcacaaaacagaatgcagtgtttaaagtcttacacacagagttgattaagatagtcagctttgattagtgtacacagaagacccagagagccaaactctgcttgtattctatgcacacatatgtacatctggccagatgtataaatgtgtgcttgagtttgccctcttggacatggtctttgatgttccttgtaagaatgccttcagaatagtcaatgagcctttcaagtttactgtgaaagaaatgcaacagactagaccattgctgatgtataatacacttgtcaccttgggagagttcacaggatttgtaaaataaattctcagaggtgaatggaatctagggagagttccccgaagcttgctttatgcaaagttgtgtcactttctggctgtggggtttcagtcccatctggcaaacacttggccatctgcccaggccctgccctgaatcagggcaggagaggtcaaggccatggtcatttcactccatacagatgttgaaggcagacagaaagggggtgatctagataaatatgccggcatttgtagcccattctttctttacttgtatgaagatgggaagacccgggaagtcggaggcagaagagtaatattagattgatcacagtccaaaccctaagaagtatgtgttaccatcctgacttcacaaatgcagcatagactataaagcagtctgcaccccattatctacacccccagtgctgtggaagcaccatagagacttaagaatcatcccaaccatacctgctgcatggggattctcaacccatctccctcaggaccacaagtgcttgccagccattctcttgccttctccataaccctgcaaggggcaaaccattcctctcaattttatcttgtctgttgccttagcatcttccactggactagaaactgtaaggggaaaagagcttttcttgaatggtcctattatctccttaaagctgagcctaccacatgagatgacatctttccaaggtaaggcatgtctgtaaggtacaacatggtgtgccatcttcaaacattttgcacggcacctcgagtgagagagtagctgagcaggtgatagcccttagttagcccaagatgccacgagcacagattggttgggccagtcaagtatgaatggtaccagggttacacatgagactagaaggccactgctctattgccaagtggctctgtgacccattcccatgccttgaacactcctgtttctgcatctgtcaacaaatgtatcaataccagcctggcaagagaacaagaagacaaggacagctcgtaatttgtcatcagagatgagaaggaccactaggaagccttggagcattgggtatgattataaataagaggcatcacaacatctctacttcagggttctttgtttgtttgtttcagtatagaagcatcttccaggtggtgcacagacctggcctaggaggacttcagccatggcccccctttccttgggatgtggttaagcatcaatgagggaaacctccttttgtagaggagaaacatacgacctgggcttatgagctggcgtaagtggggatacacagggatggatacaactccaccatcctgctcattagctgggtagaattaccaggcaagaaggttaataattacacaagtaattaacactgctttcatattcagactctaatcctatagttgcaggatttcaactttggtccctacgtccaagggaagacgagaacagaatggcaatgaacccaactggccctggagagtctctgagagcgaggcgatggctctgggcttctaaccattctacaagcaggtagatctacacaacacagacaggaccagccatgctccaatggtattttttttaataaccatctgtttcttttttgtttgtgttttgttttgtggcagcaagagctgaagttgcctgcaccacacagatatttgacaccccaatcttccctaagccacccctcccttccttcacgcctacacactacacatttggtgtcagtgtttattaaagataactaataccctaagtctttatttacttctgtttattgctgtttcagccagagtcgctggagaacagctaggcttctggtccatacgaattctttaatcactgttaggaggtaaaatcatctgtgacaactaatccaaaaagcagattatatttattttggctacagtggcttgcaattcgttaaaatcaacaaagccttttcattagccccccgctggtgtcctaaaaacagacatttcaagggtctcagccgagctacgcacatgcagccaagctaattctgacagattcatggtgccattcttaacacaaaatctcattaaactaacaaacaagaaacagaacccctctgctttcatacaaaggcttcattaacatgcctgaactccaaaatcaaaatcagaggcgcaaagcttcctgaacatggaaactaaacaaacacagggactgtgccattagttaagcaagatttaccaaaaatgggaactttttgttttctcctttaaaaaaataatctgggaaagaattagaaatcagaaccacggtgcctattgctaagcggtttctgcctgggcatcctgggctttcagagccaggctgtgattaacttcattgttcaagagactggagcaggaatgaagccaggacagtgatgaagcagggagtggagaatggagatgcttggtaggggctgaccagaccacaatcaggtgtgtccccagcccagatactccctcttcctcccttcctgtctctctctcctctcctcccctcttccctctccactctttctcccctctctactctccctttctcctctcccctttccttgtgtttgcagggtattttcccagccttgagccaggctttaaggacaacagcactctgccctccttctggaggtgtcatgaatgtacccaccctgcggtaatttttttgtagacacagttctttcatttgccaccatctggctgtccatctctcagcaaaaggacctctttaacaccaagtgggagtttaaggctgaggggggtggtccaggaaagatgtgcacaggtaggactcagccatcactgtgccaccaggcagcagccataattaatgaatacatccgaaggtctactcaaggagcagagaaggtagacaatgatttatgtttacctgagggggagattatttaacttcgcaggagctttgaaaacaagggagcccagacatattcagatatgctgtagcccctctccaaacctgatgggaacttcaaagtgtaagcaaatccagaaataaagatggggaacaggctagaaggtgagccctgaagcgtccctcaaggctcctgtccggaagctgccgtgaagtgtgtgtctctgtgattgccacggcagtggaattacctgcctgtcctccaggactaattctaaatgttgtcaaggataattatcagatgatacttcacccaactctccagcctaatgtgcagatttccactagctaaaacagagcctcaaaagtcatcccggggtagccagcatctctccaggctcttcattgtgcaggctgagctaatagggctgcctccaagacaaagaaatccagtttggtgcttttgtccagcaggtccttcagcccataaaagttcggtttgttccaattcattccacaagcgaaagacctatctcttagatgggataatcaaattcagcctggaaggaaaatccaaaccaagcttcccaatcagacttttgtccacagggagaagtgagccacatctgatatacaaggtatcattttggttctctataattaaaactattgttgccatggtaatcaaaagagtgctgtaaatccagaggaggccagtgtggtggcttcctattattgttgctatcatttgctgtaccatgcacacgggcatgcgtgtgcgtgtgcgtgtgcgtgtgtgtgtgtgtgtgtgtgtgtgtgtgtgtgtgtgtacaggtagaggacagatgataacctttggtgtttttcctcagactctatccactgtggattttgagacagtctctcattagcctgcctggagattgccaagcaggctaggctacctggccagcagatcttggggatccccatttcctcctcctcagcattgggatgaaaaccagatattaccacatccgcttttgtttttaatctgagggaaggaaggtcaggtcctcatgcccgtaaggcattcattgagttggattttatttgtggcagaaggacaggtactgggcttggtcaaacatcatggtttggccgtcccagcctgcctcattcagtagctaaagagcctgtcttcccaggtacagttacagcagccctctcagcacaccccagtgctgccaggtaccccattccaaaggattacactcaagcaagaccgcaggtcacagaagcaaggctacttcctgagccatcttatcaggggttaggcacttcatgtgctccattcagggagacaaagactgccttgattctttgactccaagggggatggcccaatagcttttatgactgttgtcatataaacatgtccagacctgaactcagcagtcagccccagggagattccaacattctactttggtaaggttgttctcatagaagagacagaccatggtctgtggttttgtagctgagggtgtatgcaagagagagagagaggggggggagggagagaaagaagctttcccctttttttttttttgagatcccctcaggacaaaataatctaaaccaagctagagaaaagaccacacaggcttcttactctccacctgccttttcacagatattgtgaaatccagcaaacatcagttaactgaaaaccaaattcacagatccaaagacacctctctggcacagtggcacacagagtgcccaccaggcctctggaggcccagcactgggcaccacaggtctgtgcacactggcaaagcacaggcacaggtgagggtgcccaggtaccctgttagatacatcacacctttaaaactcagggccgcaaagactcagccaaaaagcaagacccaaaccctctggatggtttgtgccttaaccagatacttaaagcagctacccttgtcacagccatgggcaaacacgaagtataaagacgactccatgctcagcgcctgcagccacatctcagctactaactccaatcagtttacagagcagaggaaagagatgggtccagcggagtttcttacattttgtttttcaactaataagaagagaagaggaactagctgcttgaaactcaggaagggaacccgaaagacgtctcaataggtaaaggagtctttctctagattgaccatccaagttggatccctggctgaagaagacaatagattgctggaagttgttcacacgtactcacacaaaataaacaaatgaatgtaaaaataaaattccaattaaaaaggggggaagcagtttccttcctttattctatttcaattctggggtcatgaagacatcactgtggccacaatatttcagggatgggaaaagaaagcatcacgtttcctttaatgctaagaactatacaatatttcccttgggggaatctgaaggctacagagtaggtgacaaaatggctaaagggggctttcatctggttggtgagtaacagcagatgggcaggcaccctggtggacactacaggaaagctagctcccccccttcccccagaaagaagtgctcagcagggcccttggccccaatcactgttcttactggccatcccatcccatcggaatacaacttgttgggggattagtatggagagtgaaactttgaaataagcctccactgaaagactagatgcttcgaaatggtagctgcctctttttcattccaaaaagctctccaagccataacccactagttctgctctctgataacaaagtaaaaatctaataccgaccctgaaaatttatagacacttctctctttctgaaaagtacatgaatagtgtatagacactcttcaaagactccgtttttctcttttgtagcaaaacggcaagagcctatgggagagtggagcctggggcaaagttcctttctgcttagaagccacctgctaatcacctgcaagcaagaacagactacaagggaggcagcccagagcccacccctcagcaccctgaagggcaggggttaagcagaaacaaagtgagggaagctttcttggcctgagggggcctctgcaaagtgaccagtgagactccctgaggatagaattggaggggctgagagaagcagcagctgccgatcagaggcaacttgaaatgggccagtgcactaaatgtctgaagcagagagagacacaggaaaaaaaaataccacttccaaagaggcagcccagaaatgccttgggaagctactgtttcctgttagacagagaggtcaagagctccatgggcttcacaagcaataggctcttgtctacctgtcactgttagaaatagggtgtcttttcaatttggggtgtggctgtgaatctcaaattggaactcttgcaatggacaaagagagagtgaagaaggaccctggtttcttaacatgatccaataaaatctagctcttccccctttcaagccaagagattgtgctatgcaatccaaggggtgttagaggtgtaaggtacaggtaggaagctgtggaagacctactaacatggctgggcaggaagagaacttcctgctcttccagaggaaggtcccagcatccacatcaaggcagctcataactaactgcctgttactctagcttcaagcgatcgaaagccctctttgccgtttacggatacccaaacacatctggtgttcacacacacacacacacacacacacacacacacacacacacacacacatgccacatgtgagtgcacacaatgctttaactaacaacaaaagaagttgtcaacttctttttgtttaacccagttcccatcattaacagaaatactggggacatttcatgggatgagctcaataatccttttccaggcactgagaagtaaaaagaaaggaggccagactggagcaatcggaaagaagaaagtctttgagtgagtggtacccagcgcaccctgtgggatctggattttatattgccagtgtttgtaaggtggacatttgtagatcttgtagtgcagaaggcactttgtgcatgcagcttggagaaaggcactgtgtgcagactacctggctttctcattgcagctttcccttgtacccatggaacccctgtacccagagaatcattgctagactataaccacacccctctcccatgcctctttcccccactgtctctccttaactcattcacttttcttcatgcctcctcatccatctcacactcccacttcaagaacagtgatgagcaaatggactgagtgccccccaaggccaagtctttgtatttaccctcacataaactcagtgtccagcatgacctaactggagtggcatttcttgctctcctgggtcttcatgatcctggacatttctaatgacttcaccgggtacagagatgattccttagtctaccctgtccttcccactggagcccacctatgtcctgagagaatgtgttacctgatgagtgacgcattttaacattcaaaacagtgcccctcccagagaaacaacccaaatgtccatcaataaataaatagaaaagcaaatcatggtggaatatcattccacttgaaggaggagattctgataccatgacaaaatggaaaaagctggaggatacatttagtaagactaaagcagacagagaacggcaaatactatctggatgtagttacgtgaagtagtgaagtacctagagcgctcatcatagatacaggaagtaacatggcacatgtttcatcacagagacagacaggaagtaacatgatgcatgcttcatcacagagacagacaggaagtagcaagggctagagagaaatggagaggtgttcttcgagttctagttgagatgacaacgtaggtattcagagacagtttagatcccctctacacaacatgaatggattcaatgccacagaactctattgttttttatctatagaagaaaatactgggttgggaagatggtcccttggtaaagtgcatgccttgcaagcctgaggcctggagtgtgagcctcagaacacttaaaaatagtggtgggcatggcggcatgcttgtaacccaagcactggagactaaagaattcatggggcttgctggccagctagtataatctaatgggcacgctttgggcaaatgagagaaccagtctcccaatcaaagctgtctctagtcttccttctttctaaatactcacaggtcatttactttgcatcatggagagtgctagagactaggacacactggaactaaagatcttgaaggtgcatatttcattacagaagtcagaagtaacgggacatcccataagtatgagaaatattaaattacttcatagaagatcatgaagacctgacttggagtgggggcaggatacaccatcatgggggtgggtggaggacacagaacttagaagaaaagcttttgaagctgatgtgttggattcgaataggagtgaggttaaaactaaggagcaggcagatgaacattccaaatggtgagaacaatagaaatgaatgaaaaggcataggtatgagaggtggcttggctcggcaggagcttcaaagagccaagaatcatgcatcagcctaaaagaggggcacagtagatcatggcgcgcgcgcgcgcggtggggggggggggttgacgactgagaaatgacattaagcctattagactattttccataaaagctgaatgagaacattggactggatccccgatctcccttcctcttcaccgatgtattcaattataaagatgctatgtcagagagccctgtccaagcacagctaccttgccagcaatgtcatcgccgggtgtcctcaccctccccagacaccaccaacacccctgctcatgcacatcacatcttactgacctcactgcatccgtagctaccacacagctcacaggggaccctccctctctgagtgcacagcagccccttgccaccacccccacttcagagagactctgccaagtgcattgtgtaatctccctttctgactcacgccccctctgaggaacattcctctgactcacttctctctgttcgcactcatcctcttctcctctcatctttaatctctcttctaatctgtctccctgtagacagcctggaatattactctttcccacttggttctgtatatcttgttatggttgttcaccataacaaacggtccgcttatccaacccccccccccccgcccctccagcatgtcacctctctttgtgaactttcactggaatcactccattctcaagcccccacctctgtcagagagaactttactgactttctggtccgtgtgcatgctctctgtcaccgccttctctgtacatgggtctctgccgagagaagtcctcagtaggcagacatcgttagggaaaatgaagaccgtcactacggtaaagaagtggggaccaccaaggattgccattcctgcaaattataagctagctaacaacatgtaggctagatcacagcaagcagagttgtctctggccaggtagtaaaatactcaagtccacctcagcctcccaacttcctcctaaaaagctggccagggacagctgcaggaaggagacatggaagacaagcctgaagaagagctgaggttttacacagcctgcaaaggggctggcggggagcttaaagccaaagatgagagaaaactacaaaacagaagccagtaaggtgacacccagggtcacttggggattgctttttaaactgacaagcagaagccgaaggaatgtggtggtttagtgcaacagagactctctttgccaagtcattgccaaatttagggagatagggaagctccgtgtgattttgtcggggggagaatttaatcatgaatggatacaattttggttgggccggacactgaggattgacgactaaaaaggcagcatgctaagttcacctggaatgaatgggcttcatctggtcctaggcaaccagaggaagacagtggatttttttttttttaaattacattgctgaatttattgtacatattagggagtgctgtgagctacttcagaacatttgtatgacatttatctttgcttctttacctgtttctatgataaaatatactcaaaaatgcagctttagggagaaagggcttactataccttacagttcaagggtccagtccatcttgaaggtggaatcaagatggcaggagcttgaagcagctggttagatgaagtcagaatcagaatggtggatgtctggggctctcatacagttccaatgtcagccaggaaacaagctacccagagtaggtgggtctttctacctaaatgcattaacataacccccccccaaacacagacacacctagaggccatgctgccaatgattttagattctgtacagttgaacaatcaacaacaaccattacagaggggtaaagatcaaattggggtgattgtcatttacagttccctatcactaccccaggtgtgtaggaacttgtcctctgggggctgggagggggtggacattagccatcttcccaattctcaaattaaaatccttgttccctttgcctcctccctcatccatctggggcaaatgctacttatccccagctatgctctaccctcccagaggttcctaaacgactggaaacatcccttgggccctgaacactcaatgcagagaatttacactgtaaaactcacatctgtagctagtccacagtctatgggaatcaaggaccatgctggaaaaaaaacataaaagattgaaagttgacattctttttctttccttttcaggaaaaagccaatctaaaaacaaacaacaccctccaaaaaaaaaaaacaaaggaaatgaggtcataaacacccccaacatgaaaccatagttgactactatcctacaatgaaagatatacaaagcaaaattaaagggcaaacataaaacaaggagacatttatgtaacacattaaatttaactatttactagtctatttgtatgtgtgaagttatgtctgcacatgaatggatagattttagaagtcagtgatcttttacaatgtgggtcccaaggttcaaactcaggccatctgacttaggatcaaatgcctttacctggtgaaccacccaatcgccccatagcacattggttttaaaaggagtttaaattcttagtatataagaatgtttcaaaaattaagaaaaatgataactagcttcatggggagaaaaagtaggccaggcaacatcaacatttaaattcataaaatgggtacaaaaaacccataaaaattataaaagctatccagcttaatttaaaaatgttttggatgcaaacacaaatagttgaatacaccacctccaaaaaacaaagctgcaaaagctacagtatgaactactagaaatgctgatggagggataatttggacagtttcctaagattcattgataattttctatagaagcagaaatatagactcctctttgctcagaaccctgctttggatgaaattgtcccccactcacgcagtgattccattgggaaactaaactgcaaaatggccaccattcagcaactctttcccccaattcttctagctctctgtctgtctacatctcttatcctccttggccctgcccattttccttactggttccatgtttcttcctgatgtctagttctctctgttagctctgtcgctgaaatgtccagcctgctctgccacggccttctctaaccaaggattcactcttcatttacgccaacatgccaccaaattatcatcactgagagccctcgtcatgcctcgtcccacacaacccagtgcctcttggatgcctactgtgtcttcctcctacctgtgtctcttctctctgcccacttgaacccagtctgcctgcctcacggagccttcatccagaaaaacagcactggattggtcctttactggccaagtccttaagcatctgtggagaagtccattctctcagcacttcagtgatgccctttttagttgcctcacagctgacccgccatctctgtatcatcatttcttcaaactccagtgtaggggaagctgtagccacgcctacttaggggctggctataggtgtgcctgaccacgcttgtgagggcgtggtcaggatgatgtagagtgactgcgttttctctttcggtttcacttttgggcttgtgtacagaccgctgccacgccagctggctaggttgctctgtaagtaaggcttttccctattaaatacccttatatttctacctgactctgtattggtaatttcccactatactccagttagagtatatctatttgattgagggaccaactggggaaactgttggggtatatggtgtctatttgagacagagtgatatttcaactctaggatctgctatatcccttcggttagagaaacaactgtttcacccaccacaaagccatacagtgaatgcctgtcttgtggtaatcacatctacttggtaatgaaagaaatattcctgaatggaaaaataatcgttctattaactagtttagtaactagtttgaaatgtagattccttgccaaagtaggtagagtagacataggatactcaaaccttttgccttaccttctactcaacacagagtatttctatcttcccatgtgttcagcatctccacactcacaaatcagtgattaactggcacacaattaaatgcaaagctgactcagtatgataaatgtccacacaaatcacccatacaccatgtatactacacccagcacacacagacaacacattgaccatataccctgtcacacatgcatgcatgcacacacatacatatcatccatacgccatatatatcatacccatcacacacagacaacacatctaccctgccacatacacacacacccaaccacacacaatatataaccacacacagaaaacacatctactatacattcccccacccatccctagagactgcctcagagcccacagggttaggactcagcccccaggaacaagctgcactttacacaccaaccgaaagttgtggctacccagaacttctgtctgactacaaatgagagacttgtttaatctcgttctcttgattatggtaataagctactagccgagttcacagaacatggggaagtacttttccttgtgtgctatattagaaaacattacgaacactacatatgaatagcagatcattgagaatgcactcaaagggcacagagctgcatgcactggtcccctgcccaccgccccctggcaccgccaagtgctttctgaacctcatgttttcagggcttttcatgatgtcttcaccgaggagctctggcaggtgactgactctacttccatctcctctctcctaccttgaagtagtgagtggaggggaaagccccaagctctgtcctcggctttgtctttcgggaaagctgctcttgtccagcggcccaagcatgctaacagttcatcacaagatgctcttatccagtgggaaattccaagggattaggcaccttatcaagaatgggtagcggtcccaaacccaaattctgacaaaatatcacaatttcccaggagcacttagattcctgcaactcagtggctgcactgaggaaacaccagagagaaacaggttgatgttccagagcaccatttcttagaaaggaagtgttacagaggcctgatccctgggctgtcacacccaagggcattgccatcaggataataaagaagctgatcactttattaatgtgaaagtgtttggaagtccctgctggctcatgctcagaggctttgagaatgtacaacatagtgtgtgaacacacgcacacacacacacacacacacacacacacacacacacacacacacacacacggagcacacaatacaatatctatataaatatatatgctgccagatactattcttactaaaaacatttcgcatttctaagtgtcatagctacaaactgagatctaatttatcataaacttttcccatggagtttgagagggaaaaaatggtaaatttgactaataagggctaatgagtagattccattgtccctggaaattttggctcacactaaccgtacaaggctaagcaccaggggcaaaagcctgtaacacacaccgggagcaggactgccatcccgcatcattcctgaaatcagaggaaggatgtcaaatcatcattgctggaatccatttgtattcccagggcacatatccattgtgtcagaaattcacagagaggctttctcaagggtcgctgaaacatccatgctggagataagccatgctcacagactccagtgcgctgtgagtgggtcttcccccttttaattggcacttaggcttgccttgggaaagaaggtttttccccgcagtctatttgataaaacatagctcaaattttgtcccttcagagccaacatcaagccttctgttaattttcattgatgaagtcactaaagatggaaacaataaaaaacagccaggaagggcaggaaaaaaaaaaaaagattgccaagatattctgcttcagcttgcaaggaaaaggtattaaaataccaatgatatagaaataggcgagcaattattcttaggagctggggaggagagaggaaccactcccagacttcatgagctgggtggcttgaaggtctcattgattacttgatcagttggttggcaaatgattagtcctcggaaggtcggaattagtgactgaagctctgcccctggtgaataaaatgtgtagtctcctctctcccacctcagtgacagatgatatctgtttcctcccgtgagttttgaatttaagagccactgaagctcagcaacactatattctggctcaaatgagctgaaaattgcattcaatttgaatttcaaaactggaggggaggaagggagggaaaccctcagcacccatcaactttccatactttccctacttcctcctgcttggccacagctctgccaggctgggacccgaagtccaggatgtgttacaggacaaagagcattgctggattcctgcccagtctgagtttaaaaataaacttttaataggcaggatcaaagcaaacctcacttttacgtacatgcagaatgcagaatgcagccctccaaacaaatagatttatttatttcccaaacccaaactagcttgcctttctttctttttttttttttttcctttttctctgatgtactctggcaatgacacaggcgatggtgttttctctggaaaacttcacaaaagtaaattatttcctaaatttaattcctgggctgatgagatgcttcaatgaggaaagggatagttgcccaagcatgaagacctgtgtttgtgtcaccagcacaattgaaaaacattgggggcatgaaaccttagccatgggggcatggagacaggaggatccctgtattaaaaattgatgtggtggacagagactgaggacattgccaacattcatctctggcctccacccaggcagcaagcatggtgaatccatctgtacacacacacacacacacacacacacacacacacacacacacacacacagacacactcacacacacactcacacacattcacacacactcacacactcacacacacatgcacacacacactcacacacacatgcacacacacacactcacacacacacactcacacacacatacacatacacacacactcatacacacacactcacacacacatgcacacacacatatatacatacacacacatatgtacatacacacatacacacaaactcatacacacacactcacacacatacactcacacacacacatacacacacacatgcacacacacacacatgcacacacacacacacacacacacacacacacacacacacacacacaccattcattcctatgcagctcacttaaaacttctttccatggtttctagccttttacctgcctagcatttaagtacatgtccgaaagtccagacaggagccactaatgttatttcaaattaagtcttatttgaaaatctctaagagaaatgttacttaaagtaatcttgtgataaacactttataaaagcccagcctacttttaatgttcagataattggccctttttgcaggaacacagcaagcatgaatttgaagcacactcaggttttcggaaacaatacctttcagacaagtagacttaagtgtaaacaacatttgaaattaaaatgatgttactacaagcaacatatcataccccagactcatgggactaaagggtttggtgccagaacttctttttagggatttgacctgagacaacaaagcaaaggccaccttaattcctatccacttctaaaaactgaaacctatttttgcaaccctgaaacactgtcagtttgtgaagaaacaactcaggtcccatgtgaaaggaattccaccttgaatgtgccattttcacactggagccaaaacctgttgcttatgttcagaggcctgccatgctccagagggctcaggagcaagcaccatgaagaggactaggggcagagggggcctccatttctgcacaagcactcctgcattctgtcatactgcacacactcagaaggctgtcagcagtaggcacgccattgccgctcccacctggaggaggcggtaggtatcacctcctctgcctgggctccacctctgtgggagactctcaagaaagcatggccctcatcccatccccaaaaccctcctgtgacaatcatctctgtgtggttcataggtccaagtgagggcactgtgaccagaacaccatcagagtaatggatggtgacctatggttcaccatggagatctatagttttccttcaaaaaaataaagtgaaataaactcaacatttattcatggaaaagacagagctttgggtagataatgattttgtaattaagttcacagaagctggaatcagagagccttacctatcataagcacaggacaagatacacagaaaagaaatattttatactctgtactctaccagcatacagcacgaaaaaatgggctagccttgacagccacattttataggttagcatacctaagctcagtacaacaagggcacagcctcgtaacccctgcctcccacatgccatcttcccatcagcacactcaacaaaatgaagccctggagaacgttaaaaatactgctttagggtcagacgtagtgacacctgtagtcccagcactttagaggcagaggcaggcagatttctgtgaatttgaagctagcctgatgtatatagggagttccaggccagccagggctgtatagtgacacaaggcgacctagtgtaactctgcctatttaaaaaataataataataatgtcgctattgcattttaaaagactatgcaaggaaaacatcagatctttttgttgagtctgtcattggttacaaaggaaactctcactgatacaacacaacatgatagataatgacatcaagggactgcttgacccctgcatatgtattgggggcgtgatgtcacacagatcttaagagagcactggcatcccccagtcttgtggggaggaccttacctttcaaactgcaacagtgttagcgtaggatgctttccttacatcttcttcaataaggttgcttcattgatgaaccagcaaatagctctattcatttatgtgatccaacccaaaggagagagagagagaaaaaaaggaaaagtgaggtcattttcttggccactgcatttaataaaatcccccaggcaatagagttgagcacacattaatagttaggatggtattctgagctttagcaagtttttgattcccctctgtagacactcagggctgtattaacattccaaccaaggcatagtcttccactttactctaagtttctttcttttcagctttcttgggtttattaatcttccattcctctcttatttttagtgaattcaccagttagagcttcaaagaatttcccattataactcccatgtatagcttttggtagaaaaaaacacaaaaacacactatcaagaccaatggactcacttgacatcagcctgaaaattgcatgcttttctccctacatgagagttttgtttcttatctgggaacagacagaaagacatgtgtttgtaaagtaacctctctgtaggttttaaccaaaagttgtttctgcaagtatgttgatcaaaggaagccattaggtcaaacctcattaaattgcttgtatctttgcaattttgaaatacaaaggagaccattccataggacttgacatttcccatcactactgttactagagctgttctgggcagcagtgacatagacttacacctcatggaaggaacatggtaaagctaactggttggatgtctgccttggtaggacaattaagtagccagatggcaccaggccattttctatgacactctttgggggcatacatttgctaactgtggaccttgggaggaagcatttcaaggagatgtctgcattgccttctgaaaactgctcagggtgttcactgggtcacacttcaggcacatagtcccccacccacgccaccttgcacaactgctgcctcacacctgctgggtaaggatggagttaaaatgataatgtctgacaaatgaccaagagtgaagcttcagtcccaatttctccttaatactctaaggctaccaaaatatccagatgggagcatattttatttgatttgaaaaatattggagtactggaagacaaaagtatacttttaaaagaaaaaaaattttaggtagaatgagagcagaagatctaggaggagcagagaagaggtagggtatggtgtaggttgggatttgacggggaatagagtaaagaaaggaggctgtttggcagagaaaaccagtgtttgcagtacactcatgaatgagacaggaggcagggaaacaggaatatgaaatccaaacctatttattttccaggattgtgagcacaggaggcctgtcgaaaagctgtaatttgtgtagtgtaaagaaacattaggaaagatcccacccaaatggtactggagagttagaagcctggggtagctgatttagatttgtgtttttaaggaaagctgaggaatagagggaacattgtacaggtgctgatctgagaagtcatgttgctgtctggacactgtgaccatggctgcgaccaacaagactgcagcaatcaaggtaacattgagaatgtgttactcaggccggtgagatgctcatggttatagtcacttgtcaggcatgcctggcaaacagaatatatatgaaggcagaaggagagaagcaactggacaaagtagcttcatgcccacacacatatagtcatctttctgattctgttgctttctgtctctccttcccattctctgtctctcacacatacttacaaacacacacataataataatgataatagaaacaatattacactccactctggttgtgatgtgtgaggttcaggaagcaagcatcatgattgcatccctagcttgaagaatatttttacaccatatatgaatgtaaattgccacaaacccactgaccctagggcgatgggattttttttgtaccatctcctcctttaccttaagccactccttggaggagcctctgaattttacaggcactttctttgaaagagaagtacctctcctcctccagagggcagaagttggtactaagtccctagttcatgctaagaatgaacacaccaagaaagaaagaaaccatacgggcacagcatagtcctgatattatagcatcatagtcaaagaccacattcctctccttagggaaacccccctgtgaaatctatctcactaagccatgtagccttggaatctacttccactcaggtacaaaagtctaagcagcacatacttgccatcaattcatatgctgtcgagaccagcaagcggacagcacaagccaaggtgctttggagggacatgagtgcgcttcctctgttccctctgcatataagctgagagcagagtgagacagatgaggccagcagcagtgtctcagcttcctgcacttcctaaaatatactgttcacgggggtctgaacaatattgaggattttagttccataaacaccatcagaagatgcaacactagccaatgcaatgtgtacaggaactgctatttgctgggaaaggacacaggaaaaaggacttcagtgtctcccaggaaactttctagcaagggaaaaaatagattagaatagaataatctgcatggccacaagctaagctcgttttaaagtgggtaacaacctatctattcagatacataattatcctatgatggattgaaacagaaaattcctctcagcataagtgagttcaaactcagcattcccaagtcagccttctcaaaatctgccccctccccaactctataatgtaggcaagtgactttggtgcagtttctaatagagaaagctttcttgtgaataaagagagtatttgtaaagtatgtgattttttttcaataactcagccaaaattctccagtctaacactttgctaaacattcctttctcagattatctctgaactgtaggaagtcaggaaggaaatatctaaagaggaaaaaaccctactaaatgagtaagaaaaacaggatggaacaggatggggaatttaccttctattcacacaggtgactttgaacaccctaagtctaatagagcatggctcctcatgttctggagagtaggaggcctttgctaactatcaggggccttgtgtgtgtggggggggggagtgtgtgtgtgtgtgtgtgtgtgtgtgtgtgtgttagagagagagagacagagagacagagagacagagacagagacagagatatagacagagatattgacagaaaagagagtgatctcatagccctcacttcataagcaacagaaataaggccctggaaagcaatctggtttacatagtcatgaagagaagctacaacctctgtgaacaagtctaatgtttctaccaaccatggtggcctaaaagccatcatggctttcccaaaccttggaaaactacaagggatgtccacagggaggtaagatggaaacttttttctcactcttgggggaaatcatagatcatctcatttccttggaaccttctagaacttgctggagaagggcaaggttatagctggcccagctttcagggcagtgtgatccttcagggtgtgtgatcttttgtgaaaatcacactgcagattcttttttttttattttattagttcaaattaggaacaagcttgcttcagatgtcaatcccttctccctctccctcccctccccccaacatcccacctgcccctagccatcccccctccactccccaggcagggtaaggccctcaaaaggggctccccaaagtctaccacatcatcctgggccaggcctaggcccctcctcatcacactccagattcttaggaacaattttaagcccattccctccccacacacttttatattcccaacaagacatttctggtgctgaagatgacatgacattttttttttgctaattatttctgctgattaattaagagctctttattacatccacttgcaacaaacagctccctgtaatctttaacaaagcagaatgacgtgaagcaaatgagagatgccaagtagcaggtaatgcccaaacccttgcggtagtaggtgccattatccgctccatcaggaggtaagaaggggtggggatgcggttttattaaacaaacattaagagcagagagtgctaaggaggaaaagtgggaggaaggagcatctgctcagtcggtgcctattttcagaatttccttcaagctggcttggattgagaagcatcaattatttacaagttgtaacaggatgcttcctttgttgaagcaaatctgcaagcagaccctgagagaaaataaaaaatgaattaggaagaatttattagtgtgcttgaagaaaacaaagatttagccactgggagtgacttctggagatagttcagttcgtctccccaaacccagaccttttcttccctacctttcctcacctagttattttctatagtagatcacacacagagagagcatgaatcattccctaaacttctcctttctttgcagactctggcttgatgtatggtcttcatttaaattacaaatacactaatctgcaccgctgtttaccaagtagcattttaaatgaaagatacaagaaattgcatcactcaagtttaaaaaatgactttagactcccaacctaaagaaaagaaaaaaaaaaaaacagtgctctgtgagtcttctgtggctgcttgatttcggtcccgtggatgaaattcaattagtggacttttcattagggcactgattccgatggttggtctgatcaagaatcagtgtgtcaagccctaattctgatttttcttggggcggggcagttaatgaaaattgaacaaacctgcctgaggaaagtcagtccatgacaaaggattactctccaccatcgtgagaaaatccggagactttctttctccctgggacagttcgttgcctatcactaaactagatgacattactctacaagagagcactgcctgagtctgctgttttcaattttaatattccaaagtttgtaatctaacataaacttggaagtgaacggaaacaataaataacaggtttgcatcacctgtaggtttgattctacttcaaatacacaaaccctactctccaggatacgcacaggactctctctattaaagaaaactatttggaatctcctgcaaaatcccagcccctgacagtggagaccaggcctacaccatcagttcagttagtcaacctagagctgagcattttgttgaacttgagagctgtggtaaagcatagtcggggtctgtggtacagagcagcaggagagcacatgtttagcatggaggaggaggtatgtcccagaatttatgaaaaatccacgtaaagcagcaaaagcaacatgatggaagcccagtgcaccaaggggcctaatgggtcacgtgggccagtatggtaaactcatgtaatggccacaagtaacagcaagagtccatcacactgatcatcatgtgtgtgtgtgttgggggaggggaggtagagattatcacatagaggccattttgatacatgagttgacattgccatagctaaacactcttttcctggtggtgtttctttctcccactcagtagatatgacagatctgtggacaaggactgttcaggactgaggaggcaggaacagcaggcctgatctggtgttgcttcctcacctacagatttcatttcacttgaggttctccatgtatggtgtccactctaacactggccaactaggacactgagttatttccatagccctgcagtccagagtgatgcttgttctttctccctccagtgaagtcacctaagtgaaatctcccaatttagaatcatttccacgttagaaatggatgagggatccaaaccatatgctctacaacttgtcaaggaaattaactataaaggcactatcgacattatacaattaaaacaagagctcttaacatacttaatttcccctgacctgactttcctcaatcattatggacaaagagtatgaattcataatttctaaatagcccaggtcttttaatgtattctaggaggaactaagacaccctctcatgtgcacaggcacacacatacatttgagcatacgtgtttctttagcaagggcaaaactaataatgaatgtgaagataagggcttggctcgttccaggttgttgaaaatgtagacttggtagcatattttaagtgataaatcatacatttccatgacacccataatggagggaggggagaaagagagggagggagggcaggaaaaggagaaaatggggaggttgagaggagggaaggaaggaagtgttggggaaggggaaggaaatgaaaaagcttgtctcaacctttgtacagtatttactatatacgacatcatatgcttcccccttaaaaacttgcataaggcatctatttggaggtgtttggtgttgttgtgtttttaaaattttaacaatcatagctccgaagcttaatcacttgtatgtgttaggaaaccagatggtgtaagtgggcgtttgtttacaagctctttgcataaggattttagcttctttttcagaccggagctgtgtattttaactcagaaaagaggcaataaagaagaatgaaaagaaaaacatcctagatttcacaggtccctggctctctgccttccctctgccactgtgttgtggacttttacagggtaggatgggagaatacgaacagtatttcttaaagtactcagggtgccttatggagatgaggtgtccacccagggctcagctgcagcaggagctgaagcagagaccacagagggatgctgctgctctctagcacgtgctcttatttgttcagctacccttctcatccagtccagcctgggaccgcactgcccacagagggctgaggcctgcacaccgtagggtggcctacatgccctggagtgatctgcactccctggggtggtctgcacgccctggggtggtctgcataccctgggaaggcaccgtccacagaaagctgggtcctcctacatcaattagcaatgaagacaatgcccatgggccaatccttgtttgagatttcctgttctcaggtgtgtctaggtttgtatttggcaaaacctatggcactgtctatccttctgtgtgtgtcacctggatttatctccctcttgtcaccatccaataaattaccaagattaagatatttgtgtgacatatgcaaagaaattccatggaatttcagtcaactctgtaccacattcaataacaaatagaaagaagacacaaggcaatggaaatacgtttggtcattgaagagatggctcagtggataagaatactggctgctcttccagaagacccaggtttaattcccagaaccctcatggcagttcacaactgtctgtaactccagtttcaagagatcaagcatcttcacacaggcatatatcaagaagacctcagtgcacattgacagagagagagagagagagagagagagagagagagagagagagagagaaggaaatacatttggccacacatgatgtatttgatttttctttattcattccagaggaagtaaaattttcacaacattagaactatctccccaaactgatgcagcctaacaacgtctttaggaaaaagatatattgtgctttctctatcagaccctttgctcccttttcacaactgtgggttcaacccatcccaccccaaaagtactagaagaaaaactcagacttcttgtcaatttctctaacagcacacactattcctgccatagtcataccatatttaatatgtaagcaaactacagataatagcatgctattttataaagtattggaggatcttgggatttgggctctgaatctccatgaatatcaagggacaaacagagtcacccagaggacagctgggtccctgactaccacatgctgactaaaagaaggaatgatctagcaggtatgactgttagcttccaaagctaaggaccagtctttacagtaccacgttaggaacacctacataaattaacatactcatgatttaggtgttgatttggcatctggtttcgaaaggaaaatttaagcaagagtcttttcattgtttatggactttaataaaggagagtgtatctggtgagatttagacagtcttgaaatactgtcttgattttcaacaaaagaaatgaactttattggtgtgtggcaacaccatccaccgtgcagggatcaatcctcaaataaaagtgctagatgaaccaaaaaataacaacaaactccctaccaatgtgaagccatggtttgaacacggaagacgagacatgtgctcaactcccagtcagagactgtctcccattattccaggcaataattattactgacgacaagaactattttacacgattattgaagatattcatcatgttacataaataagacaggaacatatccaagaaaagtgcaaccaatgcctacaaaataactgtttgaaggataaaatcaggggaggatgttaagagtttccaacttcgggaaataggaacagtccccaggtattcctgctattttctgaactttgcacttctctcatctattttttaatgaatagaatctttacttctctcacacagagattggttttgtgtggttgagtggtttgcctcgctgcatatctatgcaccacgtgcatgtagtgttcacagaaaccaggagagggcatagaatcccttggaactgaaatagcagatagctgtgagcctccatatagatgctgggaattgaacccaggtcctctggaagaacagcctgtgctcacaactgctcagccatctctctagcctcttctatgtgtgtttttaaatatatggaatcttcacataatgaaagatcacaaatagaatttctggggacactgaccatggaatcaagtttaaaattagtggtcccggggaaattcttctactgtacatcttgaatggacactgtacctgggtctgtgcaaacaaagctcttccaagtttgcagctcaaaggcatcacacacaagttatccagggacttagataatgcagcaagtgtcaatactgatgttccaatttatagcccaataaactacactttgaacaatactagcaatgctaggcttaggtaacactcctggtattaatacctgcctgcagatatatagctctgagcatagtttacagcatggaacacaaacacaaatctggtgattgaaataaatcaccttcctgactgcttaagaacacacagccgaaatgggctttacgcattacacaatggagcagaaggcagtggtatatatttaaattttccatttttaagctgtcactcaaaaacttttcctacttttttttagcttattgatcttactggcttgtgatgagtcttcagctgcttggtcggctgcttttagccctgcttcctattaagagagctaaatctggaatcacaaaatgctactaatttggcagctttcgatagcaatgaaagctaaaaacagcaccaagatagtataaccctcatgttttattgccccagaatcccggatttaactactatacaggataataacgggtgcaaccaaactgcatcgctgtgtagatatgataaaatgaaagcttgcattaagtgtattaattgtgccagatcaactcttacttgtctggtccttgacaaactctttgcacaggaatatatgtgcatatatatatatatatatatatatatatatatatatgaattagtgtgaattcacacacacatattcattcatccatgtgtacatgcatttacacacttatacacatgaagacacacatgcatgtgtgtgtgagtgtgggaaattatgtatgttaaacacaagccttcctaggctgcctaggatgcagactctctctgagctccatgtctgctctcagattagactaattcttcagaaaagtgctggccctgtccttgtccatgttcaaggctcagtgaagaataacactgtccttctagccaactgtgcatactctgcaaagggtgatgtggcaaaaggaaaccacctccttgcaaggtaggaccatcatcaatgtcccatgataaagaaggtgtgcactcctggtcagtggtcccagggcaggccctcacccagggcaaagcactaggcttcttctgattcctcaaatctccctctgctgaggctcattccagcagggatggcgagaacctaaatggctgtgaaatgtatcctcagcaacagcagccagcatgctgtttgtgtcatgatatcaccttttaaggggctcctggaggctattgaaggagcaacatctgttaaaggcaatatcacaaagagaaaatctgcttctccctcttttttatgattgtcttatttttatttcatgtgcatgtgtgagtgcctacatgtatgtatgcatgtgcacacagccatgcctggtgcctgtggagtccagaagatggtgttggatctcctggaactgaaatcacaggctgtaggcagctgtgagccaccttgcagatgcaggaagacaatgcaaggccttctgcatggggagtaactatttctaaccaccaagccatctccccagcccgtttccttctcatcatctgaaattactggtccacgggcatttcttattttcttgacagctcctgtggttggtaattttaaatttcctgaagcatctcaaagagaaccccaggatcgtcttcactgctttagtagcaatccaagcccacagacaacaccaagagcaggccactttctagagagctagcttttccttttcagacctccagtaatacccctgtcactctacagactacctatagactaccccatggcactcccgttggccacttaggtgtgtctacagtttgcacatgcatgtaaatgggaagcgtggacacccaaggaaagaagacccaattccatttctccccatcaggatggtgatgaattggcctctcggagcttttctgacagttagtggaaacggtagctactgtggccagaggatgtcctagttcctccatgcagaaaggtattcagcgcacgtagtaattatccatccatctcgttcacactaaaggcatggcaatgcaattttagccttataatcaagaccatatgacaaaaaccaaggccattagggaccaatttcgagcattctctgcaagacaatgattttccaactgcacttacatatgttgagcagttgcctctgcatggttgcagctgctgccatttatgtacccccccacgcccgttttccaaagcctttcttaggaattcaataatgcaaagtgtaaagccttgctaggtttttttccaccctttcattaatttttttcatttcccaaagcatggtaggaaaatgtagagggtaaaattttacttgtgccaaagaccatatatcctgggagttgcttctctttcttctttcctcctctttcctctttcctggcccctttccctggacatgaaccaccctctcaacccagtttacttcccttggaactaaagcacagtctttcagaactgtaattagccctgtgtctttttgacttcaccactcctggttcagagatgcaatctctaaaaggaggcgatgtcatcataaaccatggggctgtgcgggcaacactccacttatcagacaggagggatgtaaatagatcttaaaatcatagaaaacttacctcaaatatcctcatgtattatttttaaaatacccagcacattttgggggtggaggatgactcagcaattaagaatatttgctgttcctccagaggacctgagttcaggttttagcactcacttcaggcaagtcacagccacctataagtccagctgcaagggatccaatgccctctcctagactcagagtacaggcacactcgtggcaaacacacacaagtttcactaccatttattcatttggaagacaaagacaattatcaaatagcttacataaaatgaaaacaagcagatgctataaaatattagcatttatgtagattttgtatggatcccattctccttcctatttcttggttggaaagacaactggagggaaggagagagactgagacagatagacacacacacacacacacacacacacacacagagagagagagagagagagagagagagagcactattgtccctcaatattaggatctcagcatatagtcacctcagtccgtcagtgcatcatgaaaactcacttccccgtgttttaaattatgagtcaagggctaatgagaacttttagctaggaaggtcctcgtggtgtaaccctgatgatctgagcttcattcccataacctaagaggtgaaatggaaaaaactcacccccaagggccatcctcagactcccacacatgtgctgtggcaggaacgcccacacccatacccataacaaataaaagaataaataaacgcaaatctctaaaaaagttctgagggaaataaactttacactaatttcatcagtattttagctgcaaaactgcatgcttttttttttaaatgccaaagtagtatcttggcttaatgaaatgcatttgaaagtacgatatagcccagttccactgaaaacacattcacacattcttagtgaccctttttccagaatgctctgtgaagacaaccaactatctccaaactagagccagcaaaaccaagcctattcatcttcactgcataccctagaaatagaacctttattcccaggcctttaaaaaaaaagttttattcatttttattttgttgccatgccttcctgaccacaatgaaccatatcgtctggaacataaaccaaattaggtcttccctgccttatctttgctattcattgacaattcagtcatggactcaagaaaattagctggaacaggcagagctagccagtgccgtgtccagcactcagccatcagtgacagaaaaatggccaagtctttcataagacagacttcataacactgtgcaataagacaggttgtgggcaatgcctttgtcacaggctttcagctaagggacaattgtaaaaaataaatgaaaacttagaattcttgaaattatatatattgaattctgtggatgatgaaaagcttgtgattatacacaggcttcagaaactgtggatcactatggtcaaaagttctgaacaatgaacaaatgcggttgtaggttcgggaagtcttgctcagggtcagaggactccttactgaattaggtctcccgtcttcagtgttgtcttcattatgccgtcagtattaaaaagctaaatccttagaccttcccttttatgtctcaatactccctgcctacacagtcacagctactctccataaaatttgaatacctaaggactcctaaaactttgactccagctaacgtatcttctatgagttcagaacttattcatcttcctactgagaacactcatttggataactaatatgaatcacaaatatttataaaaatgactctagtctacaccctttaaccaaatctacccctccttccagtattttctgtcttctggtagcttgaacaaaaacttcagagacattatctactcttcctctaacatcagtcatgcaattcagtcatctctaaataatggccaggtctcatctattgatcatgatcatcctggtccataccatcatcgttcccctcctaggccactatattggcatcttagtttccatgtttgttctctcttacctttctcttttgaaaaggaaaacattcagttaggaaatttattaatcacggcttacaacagaatgcagcaatttcaaaatttaaaatgtagggctcagaagatggcttagtcaggaaactgcctttccttccagcaagaggacttgggttcagatttgcaacacccacataaaatagggtgaggccatcaccaccccaccagggaggctgagacaggcacatcccccggggatttctggcaggaaatcatcgcattctaggttcagtgggaaaccctgtctcaaaaatcaaagtggagaacaactgaggaagacaaccaacagtggcctctggctgccacaaacacatgtacccaaacaaatccagacatacgtgcatacaccaaacatgcgcgtgtacatacacagatgaggtctaaaatttgatagttatttctctttttcctttctttctttttcatttttttcaaattcctaattctttttttctgagacaggatttctctgtgcaacagctctggttgacctgggaacttgccgtatagaccaaccatgctggcctggaactcgcagagatccacctgcctctgtctcgtggatgttgggattaaaagtgtgtaccactactgcctggctacaaatgcacaactcttaaaaccaccacactcaagtagaggacattattatcactctagaacaatggttgtcaacatgtggtggggggcagcctctttgagggtccaatgacccttttgtgggggtcgcctaagaacattagaaggcacagacatttatatcacaattcataagcatagcaaaattacagtcataaagtaacaacaaaaataattttatgtttggggtcaccacaacatgaggaactgttttaaagggttgcagcattaggaaagttgagaatcaatgcttagaagttcccttataacatgctctagtcagtctcctgacagaggaaaatatgacatggtttcaactcatgtctaggaatttacaagaatgagaatacagtgggttttgttttgtttgttgttgttttgaaggggtggtggtaatatctagtttccttttccctaacataaaacatttaaggtactcatcaatgtcaagggatgtagattagaacattctactgccttccactgcatcaatatgccatactttgctcggtagttgcttatgagaatttaagattattgcatagttttatttatatcaattaatatgctattaacactgttcaagttttcatggatccatgctttcatgggcaaatatataagagtagaattgttaggagatagggtagaaatttgattttatgtaaactacctgtttttaaaatatttgtgtaattacacacacatgcacacacacacacacacacacacacacacacacacacacactatatttaagtttagatcatgttccattgttatacatttggttactaatatcaggaatattattgttaatgcttctttccatttagtatttctgttgagtatgaaatgctcccttgttgtagtttaagtcaactttccttgataactgatgatgttggcatgcttcatatgtttataagtcatgtctatctctccctttgaaatatatctgctcacatccatttgtaaagagtgacttttaaaaaatatgtcaaatggtgtcatccctctgctgaaagccgtccaatactgttcgtatcttccagtgaaagtcctaattctgacatgtccactagagcactacataatcttccaggcactgggtcctgaaaactcattctcacagggctgtttagcctattgccagtacctcagccatccaaatccatagcagcctgtcaccaaactggagagcttcctgggaagcttcctgttcaagacacccacctgcagtcttccctttctttggcctttctagaatattctacatgaaatagtaaccacatcctcagttttctctatatctaatttcaattttaccttctccatagaatcattaacatgaaactaaaacttactttgtgcttattcggaccccatctttttttcttatcgctgatggggtaagtgttctgtgtatgtgtttgtcttactggatgataaataaagcactgtttggccaataaggcagcaagtcaggcaggactaggagtcgaggaggattctgggaaatgtagtagagaagtggtgatccaggcaggaagtgacatagcagaaaggctcatatttaaggaaggacaaccaggaagtgcccccttttccccttcgcttccgccagcagtgccatgtgatctaccagcaagggaggacaccagcggaaggcatcctctataagataagtcttataaaacatatagatttatgatcattaagactgagctaacagatgagaatcctagtcattggccaagcagcatttgtacctaatagaagtctctgtattattttgtccatccacgtggccggtagaactcaggtggctggcagagactgcccatatggcagtagagctcgggcggcttttggcagaaagatttaatcgtaacatattgccactcccttctcctcttcctttcctttttcttcctataccaaaatccaaacaacaaggagaaggatgctcccatttactctccagcttctccagatcatccctggttatccactcttaacaaaactttaccctctgaggtattgagaagaccagacttaaatgaacaaactgttatttgtcaattctaagcttcaaatttgcctacttacattataatcttaaatttgtttatttcaataagccagtttaaaaaatccatgagattaaaaatagctttaataaaccttcccccccccaagtttcatcattgttactgtaataaaatattctgtctaaaagcaatgttgtggaggagaggattcatctctgcttacatcacagtccatccttatttggctacatcacatggaagaccattgttaagggaagccagggcaaggacttgaatgggaactcgatgggaagcctgcttgctattgtacacagaatggcctctaactggggaactcattccacaggcaagagagtataatgggaaacaggaggccactgccagctagctggctctctcaaagtatcatactcactagctttcttacagcccaggaccatctaactcaggatggtgtcacccaaggtctgttgggctctctccctcatcagctaacagtcaaagatagcccctcacttacaagctcacagaccaacctagacaactcatctttcagatgactacaggccatgtcaaggggctcgtcaaaaccaaccagggcacatgtgagccatacactttcaagagcaaaattaaaaactgtatatacatataggccctttgggcttgggatgtgttatatcccccactggcgcatgggctgcgaactagttcccagctggtggcactattttttacatttttgggagatggaaccttgctggaggatttggggtcacaggagaccagtttgaagttatatagtctgggtttccttccactcagcctctgcttcctgactaaagacacaatgcagccagctccatcacgccgctggtgtcatgccttccactccagggtacactgcatcagttcccagccttggacaaaagaaaccgccctttaggttgcttctttcacatacttggtcacagcaatggggaaagtgacagatacatttaactgtgtttatgcaccggagtgtactcaggcttagaggccctgttacgtgaagtgaccataaaatgggcaatgtaccctttataagagcctgctacatgttaatcctcacaaaatattcccgagggatattcttaccctacagattagattgaggcgaagaatatttaagtaagttgtcaaatccttatcgctagtcactcctgcagttgggatttcagctttattatattttatcagtttgcctcaaccttacattggcacatgggaagggatgtgggtaaacttaaattagaaagagaacatttaagaagtattaagtagatagaaaagaaaacattctagggccttttattttattttataaagttataatgtatatatgtgaatagtgtattttctttttgtcatactaaaactgaaatacttctatgagatgtaggatccaaggagttttcctgtacctagtgcccactgtgagcaagacttactgcctgagcacaaagccatcttgcagggcatccagacttgtacctagtcccactcctctaaaataaatgtctccttcaatatgcaagtacttgtctttgagttcttagaagtttaaccacacgaatccactctttaaaaattctgcgtttttattattattactgcaagatagcactctacagttgttggctgtcaacttggctatatctataatcaactaaaacccaggcaactgagcacaactacaggggattttcttgattggatcatctaagttgtaaggaaccaccctaaacctaggccaccccctatgatggcagcccacagaaaaggacatagaagaagaagaagcttctgctctttgccagctcaccctcactctcactggcaagtttgcctgtcctgttgctgaggtgctccttcactggtattagaagctactcctttgggatcccaatatggatggaaggcaagcagctctctaggaatttcccaggactccatcacaagattgggaatgctgagacatccagtctagtggactgaacagctactggattctcagcctcttctttgagaaacagcattattggactacatggaccatagtctataagccacacaaataaatcccctcttaatccatatatacatacacacaaacatatacacatgaaccatagtccataagccacacaaataaatcccttcttgatccatccatacaaacatacataaatacatacaaacatacatacatacatacatacactcgtcagttctgttcctataaataaccctaatacatctacctgtgctcctctctggtaattcttactctctcactagagagcacacctctgagtcactgtggccatcatcatggacgtcccaggtctcctatacttctccatatgaatgaattgcatttatttgttcatcgtcctactgacatcagaaatgaaaacacaccataaagctattgtttcacagaatgttattatcccccgagagactaatggatcaatagaatcacagagggctttagcatcagggccatgtcagatggaaactttatatctacaaaagaaagcccatagctgtgaggaaaagatgaactcttactaagtggttcctggacagttaaacaatcttaaagaaccccctcccagctctccacacagcaacaaattaatgcctcctgggaagctgtaaagaacaaacttctaaaccttgcagacaatactaatgaatatttttatgtctttccagtcatcaaaagaatattattcttacaataactaaaaagtaagccataaaggaagagtgaaaattcaatctaagcaaaagggggaaaaatcatcaaaggacatgatgcagaaacaaaagaagcagctgcatactctcacaaaacatctactgtctcctgtgagcgatctggttctaaagtagggtcttgcctttccccaagtagttacaaggggagtacaacaaccttcccagtttagttctttgtgcaactggaaaacacagcgaataaaagatgtttaatgttaatcttgccagacttgattttaggctgctctttgtcggagcccatgtaaaaattctaccttgcttcaaagaaagcgactaaccataggtggcattgttgcagcacacatcttgctctcaattacctgtatgacagcaaagactgatactagtaaaacttcatttaagttttttaatcccattcagctagaaggtcattgacacttcagtaattgctattgaaaaccatttggctaaacgagaaaacacacacacacacacacacacacacacacacacacgtacacacaaacataaatcgtggcaaatctttactacagggtattcactttaaaagaattacctagtagtgatctagtgattagatcagtttttttgcctaggaaattttcttgatgatgattcctacgacagttctttccccctttctctcaatcctacgcagaaagtctcctttttaaatctttccaattctcacaaaaaaaagaatggaaagacctttccatggttttgatgtaaaataaccatggtaggctcctgtgggtggagattgcactggcagttctgttttaggagggtctggtcactttgggaaaagaggcacgtctagagcgagggtgtctctatgggctctagagtgttctatcccagattgcttctagttccttttctgcttcctgggtgataccgtgcttaagagaaaccacagctggaaggagctactgtgccacattgactttgccatgaggatctgtaccccctgaactctgagccgaaataaacctttactccctgaagaagccctgtccagtatctagtcacagggacacaaaagtgaccaacacaaggctgatgaggcagcttggttggtagagctctggcccagcgtgtatggagtcctgggttccattttcagcaccacgcaaatcaggcatggcggtacttgccttcaatcccagctgttgaacggtggaggtaagaggttcagaaacccaaggttttccctcggctacatggtgagtttgaggccagtatggtttacttgatatcttacatcttgtcaaaaataaaataaaagaaagacagaaggaaagtgaaggggaagaagggattttggaaactggagagcagctacttcctgcagaagggcagcatgctggcatctgggccctcagtaggagccctgacaccgagaatcactagggactggtcaccagaccacgtcttcccagctgggagcctccaagtttctgtgatttcttttctgtcttccttccaagaggacagggtttaaaagagctaagtgcctaaacgtccctcatctgtgaatgtctaaaaacgtgttcccatttgagagcatggcatagaaaagagtgtgaacaagcatctgaagactacaagttaatcgcggaaagacccacatctgttgccttgtccttcagaactcaggtttctacaagcaaggaagtttcttggtgctaaattctagaagttgctaaacaaatcctgtgactaaagaaacaaagcaaaccaaacagcagaatgtatgatgaagtgtgctatcagggatcatcaataccgaattgttctgaagctttctaaaaagctgttctgtttctgggctacatcacgctccagggtgacctatggaggaatgagagattggataaggacagcgcaaatgaacaaaggcatggaaaacagcaactgagaaactacgtaaccatcaacatggcatgaggtgatgagcaagggagaccagtgcctaacatccctcttcatcctaaaggacagtagcttttgatgctgcagcttacaaacccaaacacctgcgttcaagactcaccaagaccctgggcatgttccataaccgttcacagctgttttgtgcaaggatagaaaattaaattcaaatcactgactttctagaaaatttaatgaggcgctgtacttagaacactttgcacaccataaggcaaaaggtaagtgtgatttgtctgcatagaggaaaatcgggcgagcaaatgacagtgaaagcaataggcattaggcagcagggagtgttcagagtgtaggacagatgacaagacaggtaacagagttggcttctgaggctgtactccatcattggtttaagagaattataatcatgcctgaaatggaagggcagggagacggggtaatggtcttgccacccagaactgggcactggggaagcagagctcactcaccagctccccttccagatgctcacttatgccatctttcttgcggcccccctgggggacttaaaagcatctatctcccactacagcactagttggctccctcttgcaaaacctgaatgaggacctctcttttccccttcattatatccaaataaagtttttaaatatgagcctctgacctataaagtcttttaatgatgctgtggcagatattaactctgcaggctgttcttagagggtcttagagcagaggagatacaactgtgcccactcttcccccagagcagatattcccagtctgtgggtcacgaccctttgggaggtgaagtagcaatgaaaataattttatagttgggagtcaccacaacttgaggaactgtattagagggtcacaggattaggaaggttgataaccactgcctcactgtgtgtgtgtgtgtgtgtgtgtgtgtgtgtgtgtgtgtgtgtgtgtgtgtaagggtttctctgtgtgggactctgtagtatatgctggggtgaacaacacagtctcagcctcagagaatctgttccttggaaagagggacatcattcaaaactacatcataaaagcaagtgatctgaaagcgttcagtcaaggattggcaccaaacacgagagccaggcagggctacggagcacgaaaaggtgttatcttaaagaggacaacatactaatcagacaaaatcaagtcttggtgattcctaactagacacaaccataggcatgcagaccccgtgttaaacagaagccagataaacataaggacctaagagagggtagtagggctgtcttatggggcaggggacagcagggagataccatccatgagacatgtgagggtcagacaagactaattgtcaccatgttggtcattggtctttatcttctggaaacaagtgaaatctgtagcacaatacagacaaagagccaggaaatcctggtcagagtctgagactcacacatggaaagataaaggatgtcatacctgggaacacccagcaaagaactttgccccctggagccatggatatgcttctaatctcatcacccctcttcagagtgtgtgtctagcctgtgtgcctggctgtgccccatgggcagctctgctgagatgctcacaggcaacgaagagcttagacaatggtagtatagagtggagtgtgcccttgctacaaagaagacatgcacagagagtggagggtggtgactgacactgaacacaaccctgtgtccacttgaccctagaggcagacctggagggaaaacttatcgcccaaacttgctcttcagtctggtccagatagtagctgtctgtattaaaatattatcctactgctggtagttctgtatttataaaaggagaaagaagggaaaaatttctggcagggaaataataataaaatgtatgatacagagaggtggtgggaagatataatgttattttacatatttgatatacagcctaaattaagccatagaaaagaggccatgaatcttcacagcctcattatcacgccttcctaaacctcaaatacagaaaaatacatttcataaacaaaggcccaataggattttaatagtacaataaatttcagagacatttgcactaatcacatttcattattttttttctaagaaattccatttgatggagagtcagattttgaaagaaggtacaaaatatctttggggagctagtttttgattaaccacagaaatgggagccaaatgtattatggacatatcaagcactatgtaatttcaaagacacttgcatgtcttgtgtctccaaacccccttgttaataacttctctttgccaagggttaacattacacctaaaatcaactctgaagatgttctatgatgctgactaatttccagcagatgcatgcttttcagtctctacagataaactttcaactcaaattttccagtttctcattacttccttggctgcagaaatcctagtttgaatgtcatttccaggataatctcacactcaggacacatttgcctagcaggactatcacaccaggacaagaggggtcttaacctgctctctacactttatctgacatgcctacagctgtatttcagtatatgagatgtctatagggccagagagtgtaacttctcttgggttatttctacttctaaatcttctatgtatagaacccaaatcctgcttaacttgctgtaagcctgccttcctctcagtgactgattactcaatcagatacacttctaggcctgaagggagctactcttctaaacaatataaatgtgtaggtatgaacacagcaccctgggatgctggcaggtaccgccagtgggagtagatgctggggtctgggacattgagagatggctcttattctacagtccattccatgataagagttctaaatcagaaactgaccttctagatcattcccctccaggttgaatatgctaacaaagttttcaaagaccctgttaacagtaccgatttagatccaattagtctggggtagaaactggaagtctgcatttcccaggaactccagaaaatgtggacattgtagtgtttggcccaacctgaagtaacgaagtaacaacatgagttctagttgctgaggaaagaatttggttagaggacaaagaactgacaaagacttattgcatctgctcattctgtccccaagagtggtccaggtttctcacacaccttagctctggttctctgtgtgtgtgtgtgtggggggggtgctcttgctctggttctctgtgtgtgtgtgtgtgtggggggggtgctcttgctcttgttctctgtgtgtgtgtgtgggggggtgctcttgtgttctctgtgtgtgcttggttctctgtgtgtatgtgtgtgtgtgtgtgggggggtgctcttgctctggttctctgtgtgtatgtgtgtatgtgtggggtggggggtgctcttgctctggttctctgtgtgtgtgtgtgtgtgtgggggggtgctcttgctctggttctctgtgtgtatgtgtgtgtgtgtgtgtgtggggggggtgctcttgcttacacactcattacttttccttcactctcaagttctacttcatctcgaggagtcacagccaacagagcagaaactagccatataaggtggcagccctaagtaggtacaggttcacacacgatgtggatagagtggtccctgacacacttttacttctctcacacttttacttccccacatactcacctccagaacccagggaacctcggtttacttctgctgagagtaaagctagagcatccttttcctctaaagttgtctgttgtcctgtggaacactacacaaatagccatgggttgccaaacccaatcaaccatagcacacagcatggttgcttttcaaagcacaagcgttgtattctaaagtgagatgggtcaaactctcagcccatgggctccctgatgactttctgtttggccctactgtgtttcaggccacagagctccatgatccagtgtgcttacccatctcaaacagactccacgaattttcctaagcaagatctctcgttacaatctgtccactgttgctttaatcggaaattctctaacttcacagaatgtggagtgtctctacatctgctcatctgccatgtgtcgacctactttggtggtgtctgttaggatcttttgcagatttttgaactggattactggttttcaaagttcttttggttaacagtgcttcatcagatacattgtttacaaacctttactcatgatgtgtgagctgttttctcttgcaggagaggtcctccacaagtttttcttttttttattttattttattggtgctgtcatgcatatccttcatttactaattgtactttgggtgtcaccccaaattcaccgccatattagaggttaacgacatttcctctcatgttgtcttccagagatcctatacttgtgcatcttgtatttcatgaaacatttggagttcacatttgtgaagaatgtaagatttgagtaggatttggtcactgcttgtggatgcctgttgtcccagcctcatttaggaataatcttttttctcctttagtttccatttgctttgcttttcagggatcaattgacattttactgtatctccaggctcactactccagtttatcattctctgaatctgtcctttccccaatactgctgtgatggccatacacttccagttaagtccactgtcagtccccaatgctgctcttctccttaaatgttgaattggctaggctaagtccttgcagctctacctacacttaagaattggtctgtcaatacccacagagtaactttctgaaattttgacgggtgatgcattaagtctgtggatgaggtttggaagaactgacatcatgtggatattgagaattcccagccatcaatgtggagtaatgatctgtttatttagttctttgaattctcttgtgagttgtgaagttttgctcatgcagatcgccattctaccttggagcatgctaatgcagctcttaccttccatgcatgacccagcaggagttttcccttctcttctgttcttcccgtttcctacactagctcctactggaccttcaggtcttatacatcctgccccctctcttgggaaatctgaagaacatcactttgtcatttatacattcatccattccttcattgatgtctactgagctatgaaaacacacgagagatgtatcattaatactcccatagaagttatacttagatggtgggggggcagtgaatatgaaaggaaaactgctctatgaatggcctccatgtggagatgctcactaagcgctgaatggataaaggctaagaacctcctcctagtatttggttacattaatttggggctggtttcccctctatccaatggggggggaggggatacagagataaattgcttttattttctactgactgcaacaattgatctaattcagcaatgagttcaccttcagcgcttaataaatgcctaattgattgactggctgatgtttcaggagcctcatttttaactattaggcctttcatgggaatctgcaaacaggattttacatctgaggtatggtgtgtcattcaaagcccacatgtgttgaatgggcttgagtctgaggcacagaggaagatcacctcttctccctagacaacctccctccccccagcagggtcagattcactggaggccctggtcatgtttatctgtttataatctttcaggtgtttatcaaccaatggttttaaaaaaatgcagagaactaccaggaccatgcaagaggagccatccaagttttactaccaactggaaaatccacaaacaaaaaaacgaagatgagaaaaatgcatcactaaaaatctaatgtgcagttggctaaatgataaaccaatttgaattagtgggtactaattgaaaaactgcatgacaaagtattttcccattaaggcaggaatttgctgaaggcattttcaattattcatcatgcttcagtgaaaagcatcacacatcccaacagcatcctgtcgggttcaactttgcctactgatcggagttttagcacaatggctacctagcccaaattactttaaaaattacatgccaatgaccttgacaacgttctcctcttttatgagggttttttcctccctcctctccggtcttcatacctaaccgcacagatgtttaacccgagaatctaattattatcagagagtgttaatattttaaccttatcctggcttatctgaatccggaaactcagagttcactctgctttaggaggcaagaggcatatgtagaagttctgatgatctagaaggacattttagatgaaggactgtctccctttgaagcccacaaatatttgaatgtcctttttcaattgcttggataacttgcccttctcaaaatcggggcagaggtgactgccgggagccaaaattgtggattccaaccctacagggaagggactatgtctggaacataataccctgttggtgctcaataaatgtttattaatgagccccgctttctgacccaggaacagagaataaatctaaggaaggaagattatgcaaatagacagaaaggtcacccagccctacatgggggtgtggcccggggtgggggcagaaccaagtcattcaggtgacaggacatcctccagggtgtatggtagtgaccctggcaaccctcattccaacagttatctattccattatgaaatcacgtagaacatttcaggcagtggctgagacgctgctgtggggttggggcagctcttttctcacagtggtttatggagatttgtgggctggagatgtaggtggagaagagacaagcaaggaaggaccggagtgccacctggaaggaccactaggaaatattacttccccattatgtagtggtgggatggaaagtgggcatgaaatcaactctaaataaagtgtatgcacagccaagaatctcttgtgaaagttacatgtgaaatggaatcacaagccctgataatgcatgtcacccaacatggtgtattgcgcaaagggcccttcatgcaaaggtgaccaaataaaatctgctttctctcacaccaaacagaaatgccaagaaacagttaccagatacctcctgagtgccatgtgtcctttcccccctgttctgcagcaagccatgttcctgtgagttggcaccagtcattaggcatttaaaattattgtttttaatctagtaagtaaaaccgaaatttgtgatgatttgtcttaataaaatatttatgatacttcaggaagatagctaaataactctcatctgagaacaaactatgaaacacaactaaattgatctctccccagttggacacacacctcaaaatgtacacagacataaaagacggacatcgctattgtgaaagtaacatttcacaggcactgtccccttttaattgaaatcttatctgaggtgaaaaaccacctctgtaccttctgccacactaatcttctctagcctggaggcccacagcttgtgaattattaaacaatcatatttgtagctgcaaattgatttctgagagaatccatattgattgagatatttaagactaatgattttgaggttaaggtgtttcggtgttgttacatgtgatgaactaaatgggtagggctttgtttcatgttggaatatatatattcctttccatgaaaagatgttaacagcctccctttggctcggaatccacctgctaggtcaagtctttctgaacatcccgaagaactggatgtgctaactgatgctgggtgttgcccatcttcattaaagggtggcaactgggatgctgggttgatttgttagcaactggagtttgaagtcatggtgacaaccattagttgcattcatcaaccttgctttattccagagattcaaggtgtcctgagccacaaacagctaccagcaaatcaccccagtcacaagataaaagtgaagtagcccaaactgagcgaaatagacactagtcaccaagacaaatgtatgccaagggcaagggaaatgaacttcactgcaggtcagcagctccatcttcataggcattcacatgacacagtgatacccaataacagtatcagagatgctccatactgactcagctcctcaaaggaccaagatgctgagatggtataagctacaacccagcattgacccaggaggatgctaagcttgcaggaaacctgagttccagggcctgatcttccatggcctgggtaaacttgcccagagaatagaacagcaccagaccacccccacatagtatgaaatatgagatataatccctacttcttatattcacttagaataatgtgaataaaagatgtttaatctggagagcactgaacaggtgtatatttctctggtgttctacctaatgtgttctgtttgttaaattgatactaaagaatatatgtatgtttgtgaatttgtattcgtgtggaggtgtgcgtgcatgtgtgaatgcatggataggctagagatcaacctcaaatctcttcctcagtcactgtttactttatctcttgagacaaggtctcttgttccaactgaaggtcaccaggtcagctagactggatggccatcaagtctcaaggatcaccctgtgtctcaagtctcagggattgtccagtgctggaatcccaggtatacatatggcttttcacatgcatgttgatgattcagcttgggcccgctcgcttgtgtctgactgctccacctacccagccccttgtcaataggttttaaaattgtaggtttggagtctctgatttcaagattttctccctcttctgtcacatcaaatccatcaccaaatcctgtttgtgcaactttttgactacatctagaatccaaccacttcttcaaattctgtttatttctgcagaccaagccactctctcctcttccctggagaaaagcactaggctcctcacggtctatcctggactgtcttcagtctactctctaacagtcactggaatgacttcagacacatgcaactctttctgaaatcctgtaagtgctttaatctcagagtaaatggcatggccatgacactgacctaatgaccttgcatgtcctgtgccacctcctccatgctcttccctcagcaaatatcacttcagcaccatgagctactcttttctcattactcggaacccccaacaaaataaaacacacaacttcttcaggtcattttccaagtagagcctctccttaccaccttaggtgaaactatagctcaaatcacctcatccctcttggtctgttcttttctttctcacaagagatacagttcatcattcttattgaatcactgtcaaaagagaatgtaagctgtgtgtagccaaggacttccatggctgtgccccagtacacagagcagagctgggtcaatgactgattgctgaagaataaaagggcaggtgttcaaattccaaactgagcctgcactctaatgccagtcttgatttttaggggctgttatgtccatctttcttatgatagtccattgttgaatcatccccacccagacattctatcactgccaatcagccacaaagtcttctgtaactccagagctgtaaaataaagggaaatgacagccaggcgtggttccatgcacctgcaatacctgggctgaaggcagagaaaggaggaccctgcagctcactgaggagccagtcaatcgagctccagcttcactgagagacactgtctcaaatggaaggtattcagactcacaccagccatggctgttggcacaaacctgcccaggattaaattagtcatcttccagcatgaagacagagaaggctcacaaggaaggctccacctgtagctgaagaactactggttattgatggctactgggggaaagagagttagtttagtttatttagtgttgaggcctatgtaggttgtccctgctccactggatggtaccctagccatgaacataagaggcagccctaattagactcagtgggttatgataaaaaaaaagagcaataagagaaagaagaggaggaggaagaggaaaaggaagaagaggaaaagaggaagaagaaatagtacaagataacaataacaaatacaacatgaaattaggaggtggaggaggagacacacagagagctcaggggagggctgtatatgatctaagtataatgtaatcctgtgtgaaattaacagagggaatcaaaagctatatcatcatcatcgcaatagaagagaatacccaactcaacctctggcctagtcattcccatgcatgggtgtgtatactcacattcataaaccacacacacacacacacacacacacacacacacacacacacacacacacacacacacacacacaaccacttttaagtggaagtagacaatcacaattcattacagttaacaagatcattcatttaaaaaacaaaagttggtaacattcaactgcattagactctcaaaagaaagaaactcactacagacaggaaactctacagtgccaacctcacaattacatgggcctaagtctcatgggcattcttcttccaagataaagacagtgagcagaaataaaaacttcaacagagattcccaagatttgtaaccataaaccatccacatatcttcctctgatcttctccaggtgagaaataagaagcttggtttataattttttaaacagaaaaaaatgggctgcagccctttaaaacttctcagttggaaagggctatttttggtcaatgatctatttttatttctgctctgctgtttcttgaggagtccaatgacaaggacctgtccttcaaagttttagtctgtgggcacagaattagcattttcaatgactttccctggatgcactacacagacctctctcccccaatccccttgcaatctctttccccctacctgcccccttcagagggatagagggggtattttctgggataatcctcttattttctcccagaattttctcagggggcttaaaggaatttataaaaaaatttttttaaaggaactgcaggtgggatttaagtctcattaaataaatatctgcttaaactattgtctctgggttaccaaactcattttatgtcattcttaataaacatatctatatatgtttatataaatatatagacaatatatatgatatatatattactcatattgattcttcagcaaagccagtcaatgctattatcttagttaggatgctccaagcagctgtcctggcagacattttgtataaacacacacatcagctgggaatctagagatgaggtcagatctctttacccaccaggctgatgcttaacacaacaccccgactaccggatcaaggatggttctcgaacagaaaaagatccatgagtgctggtgaggctaatcttcaaaggaaggaagccagagtgtactggaagttgatgcaagagttgagctcagggaactggagccataaattcttctatcacgatgcaacgaacggccttgcagattgggcagatcatcttgaaggccttttcctttattctggtcctcatgtccacgaagccagagataaatgactcgaaagcactttggaaatacacagggctcattatagaggcactcatagaattctgaatatatctacttcagttcaaaacctggtatgtcctgctgttctacttttaagtcataaggaaagaggctagagataaatagatctagaatttaatctatttgattgcaaagagccacccttagtcaaaaaagctaagatgcaggcaacaggctgagagagcaagacagatctctcccaccaggggcgtttgttgatcagctacttcatttcatatccccacaggagtcttcgcagagaccatttcaagaaaagtaatttataatttctttctcaaaaaatagtagctttgttctttcctccaaactatcagcatcaaattatccttttctggtgtgtgtgtgtgtggggggggtgtatagacagaggccagatgaagacatctagtgtctttctctgctatttccccgtatattacctttagacaagatttcccacttaacctgtctccacacccttatagtgctgggattacagacatgtgtacagctacatctagcattttaaaaaaaaaaacaaaggaacaaaaaactatttatttatttatttatttatttatttatttatttatttatctgagtgagagccccgcacctggaaaccactacacacacatggaagtcagggaacaactttgagaggctggttctctctttccatcatatatgttcaaattcaggtggccaggcttggctgccagcacccatacccactgaaccatcttgccatccccacacctagctttgtacagagattctggggatctgaactcaaggcttcttgcctatgcagtaactattctcccctactgagtcatcctcccctgcccagcatccatctgcagcaaacatttagaagggtgtggctttccatgatggatttggacaccttctagatgcctgttagcgttgcatctgggggggaggagcaaagagtatgtgttctcttgcattcaaaatccacaagaaatttccaaagaaagttcctctgcaaaagctgcgtctaaaagccatcactaaaatgctttataaatgtaatggaataaaaaaaaaagtcagtcagggagtggtggcccatacctttaatcccagcacttgggaggcagaggtaggcagagatctgccagtttgaggccagcctggtctacagagcaagtgccaggagatgctccaaagctatacagagaaaccccttctcaaacaaacaaacaaacaaaaatattagtgactgaagacatgcaatatgaaactaccaattgttagagttactctaaccaataactcactttgagctatgtaagaacaacctgtcacaccagcagagaaaatacttctttgtgtgtatggaagtgggcacagccctttccacctccactgcaatctcctagttccacataaagctggagaaaagcaaactcaggcgctactctaaaatgacacaaacttgagggactctctcatccaagtaatagctcattttccttacaattcccttcagcagctgtaactttcacaatgagtgtctccatatatctgccgtttacctagcaacatccttgacgtccttggtagcattagccccaaacgtctgttaatcatggcctccctgtgcaaaggcagctcttatttcagaaaaacaggacagggaagtaatgatagcaatttctttttgtaggaactgaacagccaattagacccatttttattacctctcaataatgaggtttgtgttttgattggtgagtcagctatggacttcactgagatgtgtctgattccttccttccagcttatataaggaaagagagagcaagtctggacaaaaccaagtgctggagggaaaaataaacgatattagagctttgttacttttctcatctcaattagtccagtaatgaggcctctagagtctacagcagccacaggcatgcatggagccctcctcctatccacactctctgcagtaccgtttaagggaacaatcaagaagggatgcaccccttggcttggccctcctctccttctctttctgtgttgtggttgttgttggtggaggtgtatgtatatgtgtgtgtgtgagagagagagtatgtgtgagtgtgtgagtgtgtgtgtatgtgtatgcatgtgtatgagtgagtatgtatgtgagtgtgtacatgtgtgtatgtgtacatatgtgtgtatgtgtacatgtgtgtatgagtgtgtgttagtgtatatgtgtgtgagtgtgtatgtgtgtaagtgtgtatgtgtatgagtgtgtgtgtgtgtgtatgtgtgtgagtgtgtatgtgtgtgtgtgtttgtgttgacacctgactctcctctaggtatcatttaatatgcaatctctgttgtctagttgatggaaataattaacaaactggataaatgttgaaactgcaacttattctggcatttcttcagccaaatgttgactcctgtcctgccacctctccctgtttggtttgtttggtatgcaatgctaaggatcaaagtcttaagtaagactggtcaaagactctgtccctgagttatatctcagcctgaattctgtctccttttcccttaggctttggttctgttgtcaggaaggcgctggagagaacggctttgagtgtccttctttgggcaccgtctgtttgttttgtttttgggagatggtttcttacagacacttggagtttgcctattatgccagacttaactgcccaatgagtcctggcacatgcctgtctctgcctcctcagcacggggttacaagaacaagccaaaggacatctagtttggggtgtaagttctagggtagagcttaggttccacactctgcagtaagcaccacactgagtcaccccgcccatctacctaacctcttattctctgactttataatttaattacaacatttctccttccctttcttccctccaaaccctgccatgtacctctccgtgctctccttcaagttcaaggctcctcttttcactgtagctctggtatgcctatgtgtattcatacatacatacacattacctgcttttacaaacaaagtctcattagaatacaaccacagttacttgcttccacactgcctagagctggtttttttttggggggggagggtgggggggcagaactgagcagatctgccactggggttgtgtgcacagcaaaaccagaaatatttaccacccaccctttagggaagcagcttgtcaggcccaggcccaaagtgtgcagatggtgccagaagcctcggaagagcacaggttgtctgttttctaaaaagacgcatttgcttttcttttctgtgtatgattgttttgcctgcatgtgtgaattacatgatgcgaacatgctggtgtcccaaagagtccagaatagagtactgaagccgctagaactgcacttacaggtatttgtgaacactggcaattgaacttgggtcctctggaagagaagccagtgctcttaacaactgaatcatctctccagccccatacaaactgtttcttttcactcagggattgacctgtaatctggccaaatatactaacccccaactttctggaatcaaaaaggttcttcggcgtattatggattcgactttgctaatgaggatccagtgtgtggtttcaatctctatgggtgaggaggtcagactccactgctgtgtgctaagctcctggaggccagactcctcaatgaccaagaagagggccctcagctctgtgtgcatgccctaaagcacagggtttgcgtttctgtcaggtttcctttgtgtttccgtcagttatggaaactgttggtcattttgccttctaagaggaggcagtcaaggtctccgccctctgtgtccctctcatctccattcctcctctttaagagggttagcctttctagagtacatctggctacatggctagagagacaccaaggtgctgtgaacatctcattgaactactagttattttaaaagaatctctgaagcctctacaactccataaccccaaatgcagtatttgacttaaatgcctcacaaccaagtctttcaaacactactttgctaaacccaagttctctcccatataaagctttcttttcttccccttgcttggttttgctccatttaaagcctcagtttcttgttgcaaagcccttctctcacaaaatgccaaatgaccccatcgctagtctactaaatcccgtttcctcggggccagacgtgaatgcatggggcactaatacatgccatcggtgttaagcagcaagcacagagagacaactccggttagcaaacatcactagctgtgccctcgagcctgctgtcgatgcctgaccatgcatggtccttggctgagtccgagctctgtgcagtcatacagctctgaccagtgcaccccagaagacccccagatatttgagaagtgacaccccgtatttgtccgctcccagcccattccatttttacactccagtcttgataaccgatgttattgctgttgttttttttttttttcaaagcagaaaactattcttcacttcccccatctcctgtttccttgtctatgccctctgtggaatgctgttgtcactcagacctccaacttcaaaggcactgaacaatccatgcctccataacctcatccaggaccattgcacccatctctcgttgggactgcttccagttgcagccagctcatgcctccaggctgtgctctccatggcccaccccttctcagcatctgcattgctcgattgcacacctcacttctctagacaaacacatttctcacagcaggtgttatattatccaccatagccctgcttgttaacccaacacggctacccctcttgtctccattcaactaccttccatcggatgctctggcattacagaaccaatagtttgtatctttggtagtttctagaatgttgcaggtggtccctttccttcactaattttcttctcttatcctggtatccttatctcatttggaaaacaacaacacaaggctatgatcagcccattgtctccgctaaaagctgttcatctgcaccctgtcctggctatgcactgaggatgtactaaggccagacaaggcacctgtcagttgagtgttgtgtagcagtgtatatgaaagctacctgcagagaaaagggtgctttgtctttaagtctctttctgttactcaagaatatgacgaaagagagggaattcacgtgccttatctctacactaaacacacagtgctcagtgaaacatgctgacaggagaggctagccatgactcttcaaatcatctgtctctagctccattgcatctctcaaaggccataaactaactgggtgaccttgatgggctgcttctcttctgtgaaatggggcaacaatagtatcccctgaaggctgctcaagaagccactgaagtgacaaatagcacaaaaatagtcaaaacaggactagcatataaacaacccctcagtcaacgtaatagtccattactttatgtttaatatggcaccagtgcacatttgagggacaaagaatttttaacattaacaatataaattaatctcttcattcaaaatgtcacttactgtacaattccttcctcgtctatgactttctattatgctggatgtagagtacacacacacacacacacacacacacacacacacacacacttttccaaccaaggcttgtttatctgaggatgagggttggagaagggaggactggtggttatggatgttaaataaacaattttttcttacaacaaccctctgcaccctgttctcaccatgtcagggcccgtgatgacttagtgtctcccaagcatgaccaagcgattagcggggctgtgtccatgcatcttgacagtaatgggagctctctttccatttgccacgtattgaaggctgagcgctccactgccttgtgcattttcaacttgatgaattcattattccctgcattttctccaccctcttttatagaaaaatctttcccaaaaatgccaggacttgttctttctacccttaaaaaaatgggtaattttttaaaaatgtaaaaaaaaaattgacatcacatctgtaacagctcagctgcacccaatggcaccctaagcaaaagaagaaaataaaatgcaaacctacgcacagtgccatggcacgatgttgtcttttgtctgatatatgtacatgaacataacatggttgctttgtgaggagaaagaattcccaatataactgccaatatattattaaattgaaagaaagaggatgaaagttgtgtgtgctggggtggtgaggacatgcagatcagagcaccagaagtcagagtcctccagtctgtgtcttcttcaccctactggagcacactgggcctgaatacatcatgtagcattccactgtacagggtgtgtggcccgtccacaccccatactcacacacaagcacatactacaggttggcagtaccaagtcttgaagcttgcactcctgtaagacattgtctagagacagagggaaagagaaaataattctcatggaacagaaaggtgggtaacagaggccaccttaaaacacattagttgccaaacttagttttatacactacaggaggcaagtgacaagctgtctggctaaatctgaatcaagatgtggtgtttgatgaacaccactaagaacctgacttgtatagaaggtaatgtctcctgcaaatgtgcaagacacaataaccaacaatgttacattcatacacacgagtctataagcaattagaattggtgtttaaaactgttgcctcatcagtcagactatctgagtcagagtctgatgtcacagtggcagaaagaggttactgaacccattaagcctccattttcttatctgtcactaacattattgctaccaatctgatactcaatgcagtaattgatttgtggaatattcttagcatatattctgctattattagaattaatatcgtgcatggtagcactgatttttcttcttttggccgttttctgatatatcttaaatagttcatctttttcaagagcaagtattaaagatgcttctggattaaaatttttgttgttaaactttgtattttacctaaatatgaacaaatataaggacctgtatttttgatatataaaaatatgtatatataaataaaacgaatctgcttcacccaagtgagtgatatccaatgatagaatttttgcaatatgcactcagataacataatttattctatgataccaaaggaaccatgactgttaactgggtttcctatataaagtgaagacttatctcccaaaggcaagaatgtctcaaatgggtctctcctccatatggtaaatagccaagcatcccgccacccctgtcagggtacaaccttgctgtgggcacagatgacacatcagatctaaatatagggtcacagtgaggctggggatgaggagtaataaggtggaaggtaggtggagaccgccatgctataaataaccaaagaacgtgagcacatttagagactcccatgttcccatgtagaggactcagtggagctcacactttgcaaaaaaaaaaaagagagagaaaaaaaaagaaaagaaaaagaagtagtagtcagagctacatccagcttcctgcgacaccctggcaagaacagactcatctctatatatattgttttctgagagattagattattttaaagtcttcccatccccaaaccgcttacatatttgctgagggacggcccgccatgctcactggtttggctgtcgtgtgaaggagcaccctgaacactgaagcttgctttggtgaagtccaaacaagcagtgtgcatcttttacccacaagtttttgtttctctggcatcaccaactcggatgctttttacaacgttttgacagaaacaaacatctgttttgaggattaaacctgataaatttaaccattcctataatgggaaagtgctgagtagagggggctttaaggacactgtgcagtgaggctagcccaggtgattgcaaaagaaagtctgctcagcaaaacatggctgacaacctctggaatgtctcccctaaactgagtcttctaaattacctgccgtagaagagaatctgacattgagtccattcgagaactattggaataagccaggctatccacagatacccactccgtaactaatgtccactcctgtctgactgaatagggtctgtatgcacgtgggtttgtggagtcccaggagaagttggggtacataaagcagtgaatgaatcccattaatatatgtaggtagctttttcatctgtgacatcaatgacatttttacatccataattctggatagtctttattaaacaataaactcaagaataattccatacaaatcactagtgtgtgtaactattatttctcattacgacactggcttcttttcacgtaaaagtgggtctccaacttcagagtcacaatggagtttgcccatgtggaaaccttttcacgccaggttcaaatccccagactaatttgacagaaactcatcttttagtgatgaggatagagtctatggtgagtctcaacttcaaaagatattgacatatgttggaggctggcagagcaggcggcctctgatacttaccttttgaatgttaggatattccatttgaacagcttcctcaacgagatagatttccccagtgcaaaaggtaaaaagataagcaagggaagggggcttttaagcagaaatgtacctcccctccaaaaaacttccacacacttaaaaaggctggtcaataaatctggaaaatatgagggaaatgccacttttagaccagaccaccggaagacactttctttaacagttcaaggtaaagctgttcctttgatgacagaaatccctgttggcggtgactttatgtctccctgtggtagatcaatttccccattcctgtgtcttgtacatacatggtagggttatcactttgcagtgagaatctttccacagggtaatggaacagtactcaactatatgttgtagaaagccaagtcttgctttgaagccatgtgtctggcattgttcatcaacaaccgtgatctgaccatttacaaggacacttgggacagctggtgacagctctcagaggacaagggcacccagatctctgaggtgatctagaaggactgggttggacaaggaagcatctgccatagggatgcagacaaggaatgggaaataaaggactaagtggcatgcagtcaatgctcaccagtattgagatttggaaccctaatctcccagacagtgagttacataggtaaagttgtgcattagcttccaggaacaatgctgcaggcaaaggaaagctaaccctagagctaaggaccactaaacttcctcaccatagagttccctctacagtctatgtgtagttgcaaatcttgctggcatttcctaaagcaacatatttgaactacaattgatttctgaattctcctccatatttcctctggcttaggggacctaagtgtgaaactggctgaaaggaaaattctactcttaatatatttaattttggttcaatagtttatatttacatggatcataaacacttccaggtagaagcaattattgtttatggttaccatgggccaatatgaattgacaggaatgttcctcttccttcaacaccaatccacgaaagtgaacaacacagatacagtgatgaagtagagattcactgcctactttgggatactgaactttgagcatgcagcaccatggaaatgaaggaagccaggtgccaaactcaaaaatattctcctcatctcatagttcatagtctaagcagtttgataagggtttctgaaaatgttgataataattccaaaaatgtatttaacacttccagtcacatgactgaagaagcttttaaaattagtgatagtcatttttttaaaaaaatctaatcaacatggtaaagactaaattatcattctatccttcatacaaaattggattacatgactggtgtatgaaaaggcaatcaaagagtacctagcaaaaaaaggaatattttaaggaaaactatcaaacagctaattaaaaatttgtttttctgactttttaagtgtggtatttgtaagctttgttaaattaaaatttctgtgattttcttccctatctgaacaaatacattcacttgtgtggctaattctgcagctttaattttccatctctcaccgagctaagcagagagggcatggatctatgcaccacttggtttaggaaattggactgcacaaagactggtgactctctggggagagaaacatcatggctgctacctcttcctgcttcccacactgcttggaaatacctttctaacactggacattaacttaacctctgactcctctctttagtgctaaaggcgaccgttgccatcctgcttcagactctgagggttttcctttaagtgttgtaccagtggaggctgggtcagagatttgatggaagttcccattttctaccatttttgccctatgagcttaagtctgggaatgtgttaacactcccttgatagaacaggggttctcgcttcccatttcccactctagtctggagcagactggtcatcatctgcaactttggctcgttctctgtctcctgtgatgttctgtcagtacagcagtaaaaatgtgccagggaatccatcccctgctgtagtcatacccaatgggtgactgaagagggacctgtgtaatattccacctccttccatctttggtggggtcactctgaccttacagaaattcccagtaggataccgctgtccagagacaatttgtaaatgccttctaccccagcttctctgttgaattgcccttctaccccagcttctctcttctaccccagcttctctgttgaattgcccttccaccccagcttctctgttgaattgcccttccaccccagcttctctgttgaattgcccttctaccagcatcttctctccactccatccataacttggcctagaatctttgtctcagggtctgtttctacaggaactcaaaccaaatgccaggagagcagagcctcatcataaaaattttaaattaaattaagaaaataaagggaagtaaggaaaagataaatacatgcataatttctgtttcttgttatatttttgcacaccagcttctctgctttctaatttccttgaataaaagatatgaattttttttaaaaagttatcattgggatttagtcctgtgggcaagtggacatgtcaggctttcatcttgctctgctcctgtgtgtgctctccccttctaatcagatcctttattgtgagtttcttgtttttgaagagatttacttttaattatgtatgggtatctgtgtgcatatgcacatgggtgtaagggccaggggaagccagaagagggcaccagagacactggagatgtagctacaggtggttgagagccactgagtatggtggctgggaatcaaattccatgcctttcctgtcattatgaattctacccctctggaacaccaaaccaaaataaaccatttcttctctaagttgcttttaaacatggtgtttcatcaaagcaacaaaaatgtaaccaatgaagcccatatatatatatatatatatatatatatatatatatatatagtctcaagttatcatttcctctggaatggataagaattaatcacagttaattgtcattggatataactgcagcaatatacttccaatacaagtataggtgatttgatacatatttttatctttatagaattcctcatctaagaattggagcatggttaatttcacacgggacaaaactaaacatgagataattagttagctaattcatccaaagcacagctttgtctccgttaaaatgaacaactaataagtgaaaacgtggtttgtagggcaccactgattaaacagaaactcagcccaaagctttgacagcattaaaattagaacaataaaatgccttcaattccatgttcacacacacctttatccacttgcttagctatggctcacatcccctcttattcacctatttccatagatttctgcctgagcccctgaagcagactgttgacaagtcattttctattggaaagggattctggaaagttctttatccctaatcactgaaaatttttctgacatttatttttatgaaaaattgtctgtctttctccacagctcattaagaaattgtctgttaaactcatgaatcagcgggtcttaaaattatatgaacttgaactgggcatgtgactcagttcgaaagtgcttgtctagtatacacaaagcaagccttgggtttgacatttgtccccacataaacaggctgtggtggtatgtgtctgtgatcatagcacacaggagatggaaggatgggggtaaggaatttaaaatcatcttcacctacatacgtactttaaggtcagaatgggccctgtgagtccccatctcaaacagaaaattatgtgaacacataatggaatgtctttagatattttccatactttcaggcctaaccttccaggcattgcctgtgttttcatcaaagggtgtgacccgaagggtgacttggacaggaagcagaatcaatgtggatgcttcaaaagttctacagaacaatcagtgtcaattccccaaactcctacagcacaaaggttttgtaattaggaataatggatcctgttgtggaagtggaataacagtacctgtcattcaaattataaaacaaataggtaagaaaaacactttaaaggccaccattgtaaagggcttgctagcctggacataatgatcctttaacagctgaaacaacgctacatttgtaccacagaacttgcaccaaacactcacttctcgtgcatttcctttggccctacaaagcacatcaggtgcaccatcccctgaacagagaagagtcgcttggatctcacatgactcccccaaatccccagagcctgctgctgctggtcatatactctccatcatgatcaaacctcgagaatttagcaaatattcatgcccccccaccctcccagcttcagacacagcactgggcagacaaagatgaacataatgatttctgtattcgtgaggctttccccatccactgggggaaaacaactgcaagttgtttaagtgtaagtgtacatttgtgcatgcctgtgtgtgtgtgtgtgtgtgtgtgtgtgtgtgtgtgtatgtgagtgtgtgtgcacttgtgtgtgtgtatgtgtgtgtgagtgtgtgtgcacttgtgtgtgtatgtgtgtgtgagtatgtgagtgtgtgtgcacttgtgtgtgtctgtgagtgtgtgtgtatgtgtgtgtgtatgtgagtgtgtgtgcacttgtgtgtgtgtgtatgtgtgtgtgtgtgagtatgtgagtgggtgtgtgtatgtgtgtgtgcacttgtgtgtgagtgtgtgtgtatgtgtgtgtgtgtgagtatgtgagtgtgtgtgcacttgtgtgtgtgtgtgagtatgtgagtgtgtgtgcacttgtgtgtgtgtgtgtgtgtgtgtgtgtgtgtgtgtgtgtgtgtgtgtgtatgcatgcatgcatgcaatagagaagcttagatgggaaagttgaagtccttctgaagactaaggggcaaagaatggtgttagaatgtaaatctcatgactatgggagagaaattcagggtaagccagtaagcaaatattttatctggtcccactatacagtttgcttcgaacagcaaatagtctctaaaaggtaattcctgggtgtgttttactttcggtacttaattaagccctccttgtatctcaagaataaaccccttgcccaggatgtgctccatctcatccttattataggtcctgtatttgaggtttgtccctaacttttcccagcatgccaggggatgctatggtgcttacaaaggccaaagaacagcagagagctgctgagtggacttggagtcccatggagtctgggttttttcagatgcaatgaatctgctggactggtgtggcctcagataggataggaacaggggcttcactttggccaggcatccaaaccgcatgcagtacttaagcttccaagctgtcaggctttgcgacttgcccttagtgatatttaactactcatgacatgagattctgaaagctttttgaaagtcttattcactaatggaaaagcctcttacatattttataaaactaaacaaacatcaaagttaacacttgagtgcaacttgtttttctaaactctcagagcctcgtcagcatatagatccctcctgatggttctattaaaccaatagcgggagcaagttattacggggaaagaacacaagctccctgaaggccaagactctagtttatgtctttgttccccagtacccagaatactgcctgacacaaagtcaatgggcacagatgcttacttaattgtattgatgggcgacagggatctgtagtatattcgtcttaggaagcatttaacttattctcattttccttgaaacattattagctagctccagaattaaactgcaaatgaaaataaaaatctttgtatatgcacatatagaattccaatataaacacgtcctaaaccaaagcacctatactttacagatgacacatactgagagagaggacacagagtgtgtacccttactaccaaaacactggccagctgctaagtgtgagccatgcacagaactaaagtcctcatagtccccccttttggtcacatgtcagagcaaacaggtttgaccccttatcaccacatctaaacagcacctctgttccctctcagtcccagcctgccttacatcacccacagaggttgtttgtttgttcagtgctttatgaggtgccacaaccaagcagaacataagttccataaaagcagggacctggtttcaatggtaagtctgagatcttcagcaataagtaaaaacttaattcatagttgatatatgaatggtttgactcctccccttaacacgtatctggcaaataagaccgttccagaaaattggacccgggtttctctaaatctcactctcttcctggtatcccacactgccatccgcacacagcaaataaacaaaaagtgagggaaagccatcccctccttattggcccctcctcctcctgcctgatctggtaccccacttgcagctgtccttgtccatgcttagggcaccctggggagcagagtccacagggattcttcacttcccacattccttctagctaaccagtctgcaaaaagcaaagttatattagttgcattatggggacagagacaggcagacgcaagagccctctgagtcacccgaagaagccctgcagcccggatccacagaggcacgaggggaatcagcagagtggattcctctgaactcaccgggagatgaagggggcagatccaaggttaccgttttcctgcactgcagccttgcccatttgtatccaggaccctccacctctgaggcaccctgttgaatgagtcactcctggctacatttgtgcctcaaaaaaaaatattgggtagagattgcgctcactctggctcccgttccacaatgatctcaccccaactcctggtccataatgatgagtttctactggaattatgatctgcagctcattttcagtgtcttcctttagaaaaaccaacttttatctgcctcatatgttaaaatttcatctccaggtaaataccactttcccctccatatatttttatttcatgagtatgatggatgaaagcgggaaccactgttttaattactccatgaaatgaatcatttctttcattcatattttactccttatggaggttctttttggaggaaaaaaatcatgtagtgcatttctgagtttttaatgtgagtatatctatttaactatagctttgccagctacctttcccatagtaggttatttaaaacacccattttgccttattttattttccttttgagaattgagaggtaagactgttccatgtagcccaggctgatctcaaactatggagctgaggctagttttggatccctggtcctcctgcctctgcctcccaaatgctgcaatcaccggcacacacaatcacaccaggttaacacagatgtttacagaagattatatatctcaggagtgggtgatggaataactcacttggaagttgtcagttcaaattcagtttaggttgtgacaaccaaagccaatcattacccttgcactgtttggcttgcttttgtagaaaatgagttagtagccattctcagttcctagttatccatttcacaaataccacaccatttcagagtcaataaggaggacctttgtagtgacagtggatctggaagaagtattgtctccatccaggcacatataaacacatacacacatatgcatgcacacacacacacacacacacacacacacacacacacacacacacactctcacagagcacagaacaactattatgactgaacgtattcacaaagaacattgagaagtaactatgcatatacatgtatgtttatgtggagcaagtgcacttgtggccatgcgtacatgtgtgtgtgtgaagctgagaagacaacctcatgtgacattacttagtggctgcccaccttctctcgtgagatggtttttcactggcctgagtcttacaaagccagctgagctgggtggctaatgagccccagggatccacctctctctgcttccctggcactgggattaaagaccaacatctcagtaccctgctgtttcttacaagggttttacttttaggtccttatgcttgcatggcaagcactttcccagctatctccccagccctaggaaacagatcttaacctttcatccgacaaacctcagttcatgccaaattgctcaatagtcccggtgtgtgtctgcaaccatctgcggtcctttgcagaatttctgcccagctgcacaggactccacaacctgcctgctgtccactgtgatgaaagggaagacatcactggccttcagggatgtcgatctggaggcttttaggagcacaagcctgtacttgctgatgaaagacaactgagatgactcctaagaagcagtgtccttcattagaagctaggagaccaatccaatgccatggttcatccatcccctccttccgttttttgtatccagcattgcagcatggtccttcccttcattctcatcatagaccagtatgtgttccatccctaatactgacttcaggaaggtgatgaccattgctgccttctagtcctctgccaacctcctgaccgtgttcctacttgcgaatttacccctctccagggtgttaccaaagtatctctccaaaatgccactgtcctgtttaaaaccttccagttcatcctcttggccttcaggaagaggcacacactccttagaccaatcagatcctaccattcacagctctggcttccttgcctgttcttctggaaagcacacacttccccagcaagtcatggagtgctgagaccctttgtcatgggctgtatctagaaccttccaagttctatgctgggcgtggctatcatgccctgtcttgtcattccccactacaaggatattatcttcttcaagtaggaactgactctcattgcccctagtcactaccagggtatctagaccccaacaacatgaacaaataaaagaggacggatttcctgtttctcctgacttagttttgccctacgcttttgatggtaaaccagtcttgctccctaatatcatcatggttctctgttgcccctaacccagaaaagaagggactggggtccactgagagccaagattccaatggtggacccttgaggaaaattaagccttggtcttttcagaaggcttctatttacaaaataacaaagtgaagtttattccttgctggagagatccaggcataaccataagtgctgaaaacagatggactggttgctagaaacagaccccggggtgtggttgggaagtcagggagctgggatggttccttccttgactctgtgtctgtccttcaaacttgacaagaggaaaaaagaaggaagaacagagaactggtgagaaaagaaggaagggggcacatgtgcagggctgtccagcagctaacacgtggtaagcacttggttttggcagtcaactagtttaaagaatgaaagaaaagtggactagagaaggcatgactgtatataactacattatgtactcacttgccacagaagtgcaagtctcccaccagcctagtaggtgtagagtgaaagcctattgctggatattaagaagagggctggggagataccttaatgggtgaagtgtttgcctttgattcccagaaccctaaggaaaaatgttgggcatggtgggaatcccagcactgtggagatggaaacaggaggatccctggcctacttggtgagttctaaatgattgagagacattgtctcaaaaaaaaaaaaaaaaaagtggacagcccttgagcaatgacatctcagattgccctttatcctcccagagtacacaggtggaccttcacccgtgcgtgtgtacatgcacactcacacacacatacacaggagagagagagagagagagagagagagagagagagagagagacagagacagagacagagacgagagagagacagagagacagagagaataactctagtgctaatatcattcattcaaccaacatttgctgcaccctctcaatgggccagagttatttttagctatcaagaatctgaccctaagagccaccatccactttcccaaggtgatggcaagagagcattaaatctctttttcaaatgagaaacaatcttttactttacattacacaggctacataatctggggaaaaaatagaatgataagtaatagtatgccttggccaaaagccacaggaaactggggctttttttatcaataaaattagatgacattatgacatgtgcccatttagaatggaactgcaaatcataaaaatgccaaaaaacgtggaggagaaaaaacattaaaggtgctaacagtggaatattaaagacaggcataattaaagacagaaagcataataaatacagggtactttaaattctctttgtcatggggcgacactgcagtttgactccccatcctattaaagtcggtctgaattgattcccttgtataatgagcccctcctgagaacaccaaaacacatggcctctcaagagctccttgaggcagccctgcagagatgctccaggccgggtcttcctgaaggaaatggggctcacttcctttagcagccatgcacaccagcaggcaggtccatggttaaccttccctgcctggatgagcaggagtagacaaattctgtttgcctactgggggaacaggggatgggagatctctgaggaacagaccccaagctagattgcctgtgtcatctttgaattgctatgacagtcctctaagaaacacctttgactaacttacatttaggcgacacattgcagcttcccacttactttgtgtaaatttgtacaaggggagaatttatatgacttcccactcaagtcatctttcctagtttgtttttggttttgttttatgactgtagatggacaatgcttaaaattaaggaaattttttgttgttgttgttttttcaagacagggtttctctgtattgtttggattcagtcctggcactctctctggagaccagactggcctggaactcacagagatccacctgcctctgcccccgagtactgggattaaaggtgggaaccaccaacgcccagcttagattcatattttctaatcagcagcttcctcctccaccatacattgtgagagagtacaagggaattggagaaggagccaagaaatctgaattgttgtcctggaccttgtgggaactgtaaaggtcacccatccctatgcttggttaaatagcttttctctgaaagtgtggcaccaacagccctttttggggctctgttctggctccttcccagcttctgttaaatcactaatgaaatttgcatgtagaccaacatctctgtgttccccgggggttgtcccctccaaccctcttgctacttctccaccctggtgacaacataggagctaatgttggtatctctcaaaggtttgtggttttgagcagaatccaccttgcctcttaagaaccagagacctcccttcaaggcactatttctgataatgcaagtaaaactaaatcctcaaaatataaaacagatgctttatctgtaggacatatggtctgctgcctatgattctctgcttataaggctactgggaagttaggatggagaaaacagaaatgaactcttaaacactagcaatggcatgctttcttttcagcctggccggtgttctttgcctattaacaccagcgactctactccttactttttaacacaatccatgagcgttatcagtcagaacatagctttttcaaatgccgagtcctgaatctaggcattatggctcgttttgcaacagtaaagctacatatagtgttgtctattgttttactgcccctacataacttagcattttgctgacattttgttgtttccattatcaggatttcaaatcagttttcagtgctttttagtctgagcaatgtgcatatttgaatatacttcagttcctggagataattaggaatattctttgacacagcatgaaatactccagatttcatcaaccccatggaaaaatataaatggatgtgtaatgtattttgataggtttatacaattttgagaaactatgataaaaccacgtattagcattcagagaacctgagtgacacagagccccagaaggcagatggcaggcaggataacctaaggcagacactgaatgactcatgcagcccttgacctctgggctggagatgcagtagcacttctgcaacatactgaaaggacctcttgtgggaggggtctggcactttggactacttatgatttgtctgtgtttgttgtgatggttggctttaccctcaacctgacacaatgtcaaaccagccaggaacagtctcactgagggattatctagatcggggttggccttcaggcatatctatagggcatatttataaatgggtcaactgtggttcgaataccctgcctaactgtgggtgccaccattccctaagcttggtgctgtgggtcgtgtaagaggagagagagctggctgagtactaggcatgtacacattcatttctctctgctcttgactgtgggcgtgctgtgccctgctcttgcaagctcctgcagctgtgacatcatggcagtgatggtctataacctggtgttgtgactaaaataaactttctcccccaagctgcttggtctccgggtattttacccaagcaacagaaatgcaacgtgaacagttgagaatgataatacggcacaggaaagaagactatgggtcaaagtcatatgtgatctgctagttaggtaataagcctgctggtcatggaaggtggaccacacacactctctctctcacaaacacacacacacacacacacacacacacacacacacacacaccagcttgtaaaaacaagactgtaagactgggtttggatcaaaagacaggtatctgagttatatttctgaacaaaacttacatgattattatctagccagggctgtctgataagggacatagacatactcttttcctcccataagagtcggtccaaatgggcctgtcaatcaccttgacaataaaaaaaagttgcccattttagagactttaaaaacaatatgaaacttgtcaaaactgtagatcagcaaaaatggtccctttggcctctctctcttctcacccctgagagagctttaacaaactcttcctatatcccacacagtgtgctctgtgtgttccctttgaatttttctaacagagatcacaaggatcaccaggaggccagcagacgttccaagcaagatcctggtgacagaacttcttcactttagcatccctggaccagaaaggttatcttcataacaagtgtttcttaaacagagtgggagaggaagtcattatccagaacatgcctcacatcttgtcaatgttaggagaaagtcaactcagatgtaactgccatattggcgtcagagtttggatgtatgtaaaaatattcatgaggttacaccaagagtcatgtctagggttggagctgtagctcagtgataaagagcttgcctggtatgtacaaggcccagagttctgatgggagatattattctgtatatatttctcttattggtttatgaataaagcactgattggccaggcaggaagataggtggggctaggagacaaggagaattctgggaagtgagaggcacagaagagcccggaaagagaggacaggaatcaaacaatctcttgtaagataaggccatgtagaaatatatagattagtagttatgggttaataattaagacaaagagagccaataagaagcccaagccaccagccatagtttcataattaatatagcatccatgtatttattttgggcaaggaggctgtggaactgggagggaaaccctgtaacaaggttcagttcatggcatcaagagaaatagaaaaagatggagcagggaatgaaagacgtcaagaaatacatatatgctaggaaccatgcctacattatcttatagttacaatatattttcaaggcatttttagtctctgttatgataatctagtgactgaggctaagaagttaattgaccaaatttaatatgacaacgtgtgtatgggtttaagaagacagataagatcatctgattcccatatcctacttttcttcctagtccaaaggtaagagtctcatctactgaaatgtaaaaagtatgttaattcacacaaatcttagataaaaatctctggattcacttattcatccaacaaatatacattatgatatttatttaagagcttgtagttaaacacagtaatacatagtgaacataggtgtgtgtgtgaacatacaattgaaggaatttcattgttctaattttaatgctgctgaagctttgggttgagtttctgtttaattagtggtgccctacaaaccatgttttcacttattagctgtttattttaatggagacaaagctgtgctttggatgaatctctcttttgaattagctaactaattatctcatgtttaaaatgacttggaatctgggactgaagaagttcttttgcagcctctgtggttctaccatttgtctgctcaagtgtgctctatatagtgaagaaattagacagtttccacaggagagtgtttggcatacttcagatctgcttcccatatgacagtcaacgctagtttatggtggggatatcaatctcaagctgccattatgaacaagtagcataatgaggacacatgggttggacagttacctcactacacgaggagaagtggaatttctttcccatgtaaagtgtgccatgaagctgggtgctcagtgcttactcttttagataggatcaaagagtctctgcattcatgtctcacgctgatggaataaagtgtcacaaactgggtgacttcaacaatggaaatttgatttggtaccagctataagtccaaaatcaaggtggcacaggtttgggtactccatagggttgtgagctagtatgagcttgtgtctatgtccttgatttgggtggctttccagcaatctttgggactctctgattagttgcactatagttccaatcttcaggtgacattcttcttgtgtctttgcccaatagtcccctttgataaggtggactaattactttcctcaacttcaggaaaggaagggcttattttgccacgtggcataaaaaggaatagaatcatcatggtgggggagccatagcaacaggagcaggcagtgcctggacagtctacatgcagaatcaggaagcagagagcagacaggaagtagatcaggttctgaaacctcaaagtttgtccatagttcccatttgttcaggaagtttctatctcttaaaggcactataactttccaaaacagcacccccatctggagaccaagtgttcaaacaatgagcctatggggacatttcacattcaaagcacagcataaggacacttgtcagagtggattaagggccactctcatgtcctcatcttaatgtgactatctaaagagacctacttccaactaaggtaatatgcagaggtatttggtgttaggactcggatactcttggggacacacattgagcccaaaagtgacatcgtctttgggcatccacagcaatatgaactccagctgtccacactgggtacatggggaaaacagatgtatcattcccttttatcaggggcaattctagtcacacacactgaaatgaacctttccatgtcatatgggatggcagctcaatgagatatatcttgatttaatagagaaataaaaacgatataaggtcataagctaagaccatcataaagtacatacaggaaccccgaactttaatactccccagctgctttttaactcggagtgaaacaatttgcctaatgtgttcaggaatggtttgattaatttcctcctcttagtaatagccacctggcccctatcatacaccttaaccaaggtgcttttctctctctctctttttctgatcctttttttctgttggagcttcaaaggttcaggaatgcaaaagtactgacttctgaatgaaaggaagggtcccctgaaagaaagcatggttattcttgatcatggtgtgtagagagccctttcaaaccacactgtctgcagcagaggcaaggggacgatgacagcctgccttaggaaataccttgtgtacagacccttcactataagcaaactgggggaagatcaggcggtcagaaaggttgaagtagagacaatgaggtgaggtcagaaaagagtagtagaatttacatcatccagaggataaagcagagtctaggagatgtttcaaccagctgtgtgcactgggctcccaaggcatgttcattacatgttttaagagcctgaaaatgggggcattctcaaagaacttcctccaagattctaaacagaaatcttcagatgcagccatctctgcttgatcaagagcacaagggttctacattagtataaagacacgaagcatttgagcaggcatgaagtgtaaacccaggacctgccttcttcacactgtgctagagtttgtgtgcctttgtcaagcctccaaacaaagaacattccactcaaaatcatgtacatttgcagataagagatccatgagcaagaaacctgggatcaagctgaacagtcagggcaacctactacgtaatctggcatccactataattccctacatacattgtatagtacattaaactgctattctaaacagcccttctgaccagtagcataaaagactttaatagatttaaatctgactttgtaaatcaaagttactgtaagggggcctgtatatgtgaagtgtattatatacatgtttgtgatggggagattctgtgctaatatatgtttgtcttgttggttgatgaatgaaacattgattggccagtagccaggcaggaagtataggcggggctaccagccaaggagaactctggggagaggaggcaaggagaagctgccagggggatgccgtgtagccactgggaacatagggtgcctgggcattctctggtaaactaacactgtgtagaaatacataggttaatagttatgtgttaataattaagaaagagctagccaaaaagagggctgagccaacagccaagctgtttatgattcatatcagcctcagtgtgtttatttgagcctaaaaggctgcaggaccaagtgggaaagaaaccacacctgcatgtttgtgtatgcagtgtgtgtgtgtgtgtgtgtgtgtgtgtgtgtgtgtgtgtgtgtgtgtgtaggcatgcatgtaggcatcagagggcaatgctggatgtcaatcaatgccttccatcttgtttgggaaaaaggtctctcattaccactatatataccaggttagctgatctgggagattccaaagattctacctttgcttcccatcttaccagaaaagcaggatgtggtgatattttgtttgtgatctaacaaataaagcttgcctgaagatcaaagtgcagagctagccacactagttagccttacatgccaggcacgggtggtagacacctttaatcccagcactctagaggcagaggcagacagatctctgtgagttcaaggccaccctgagatacacaagactgatccagtttaaaagaaaaacagaaccagatggtggtgactcacacctttaatcccagtatttggaattacacgcctttaatcccagcactagggaggtggggacaggagtgatatggctgggcagagagaggagtataaggagggaagagacaggagctcattgcattcaatctgaggattcctaaggacaggacccccctttggtctgaggattcagtagaggtaagaggtttctcttgtggctggctccttctctgatctctcagcatttcccccaatatctgactctgggtttttattattaagacctattaggactggtgctatagcagagagataagtgggcgctaccacacccagcttgcagtcgagcctgggactttaactcaagtcttcatgctagttactattgcaagtacctcacacactggaggtactctctctctccagctgaagtgtctctcttgttttactggtccagctgcctctgtaagctgataggaagacaccccgtgacactaatttgtgagcctcagaacagatcttccacgctatataaactaaaatgactttactgatggatactttttcccaaccacattacaacttacgttctcagtacagcaatgtgtagtaactatggatagaagtggttcattctaaatcccagaaactgttgcttaacttatatagctgagagctgtttgaattagagtggctttgaagccacagatttatgtacatataaagggtagaaaactaaaactgtgtttctatagccaccataatttatcatgttaagaattaagttgtatgggcagtggtggctcccacctttaatctcagcacttgggagacacaggcagctggatctctatataatcaaggccaacctggtctacagagaaaggtccaggatggccaagtctgaaatactgccttgaaaaaccaaaacaccccccaaaagccataatgaaattatgcaacaaaaaatgtaaaagaataactgaacatatgttaagaactttggtagtataaacatccacaagcctttatttaagtattagtgatatgttcttctaagtgaccattgatatacatcatatatatatacacacacacacatatatataatatatataaacacatatatacatatatacacacaactaatatatatatataatatatgtataatcatatatatatatgattaataatgatgatttagttgctatttttggaaagtagctttaggtcatttttcctgttagtttgggtgcagatgattaaacctaggggcatattcacactaagtgtgtactctaagactgagttgtgccccagcagagttcattcctactaagactataatccatggataactacatttagcctcacaggctttgttaatgctacattctcagtactttggaattggcttaaagaacaatggttggagttgactagttaattctcagaactactattagagtaacttttaactgtcgtgactatttattgtcaccaaatgataaagcctagccttaccacaagaacttgaaaaatcctatgacccatttaaggctacacttgcaattttaattctgtgtgatttaagcctttgaacaatccatcaggatttttccttagatctttaaaggaatagtgacaagctcagaaatgtcagagtaaagtcatgagatgctcacaagaagagcatctgtgaaaccacagtggaatgtcccaccagccccaattgttggaatttgagtgaaacttctcactatgctggaaactatgggaggtgtgagagagagaaacaaggagataattgcttagttttagtttaaaatttaagatccttttactacctcaccacatagttgctaactcaacaacttccttccagacatggagtgaagaaggagacatctagtccaggatgttctcaaaccagctctgaacactggggctaagccatgggagtctcctcttcagctcaatgcctgagaaccattccaagggccaccatagcaaccactatgacttcagtcttgtaaatagcagagatgtcaccataaatctcatttattcatgggctattccctggggtgaggccaatctctctatgaatagcaaacagagactcatcattcagattgagacactcacctccctctcctttcagtgtatagtacactcaggttgtgatagtgcccacaactctagacaagagtcgttgcttaatgagataaaaagaatgattttgggacaattagggaactagatgagaggaggtcaaggggcaaaaagtttggggcaagccagaatgtatccagtggaagcgctatgttataaatacaaaatgtaccaagaaaatcaaagacctcagctcttctagagagtatgtggttatacagcagccttgctatgctcaaacaggccctctagtagatcagggtacttgtaccaactacaactacagcaaccccaagccagggccatacacactacaaccgtcaccctctgcaaaccatcacaagacctcacctgaaggccacagcaactacagacacgaacctcagcgaatcgtaaaggctatttgttcaggtttataggcctgagctgtgaagtaagtgctagcctccagtgactgctctaggatagttgcatggtgggatactaatggcaacttgcagggaattatccaaaagctgtgatgagaaacccaagtgtatctgtttaaggggtatcaaggatttattaagaaataaatggaggaatacactcacaaatacaggacatggtcaatccagttgtcgagtccttgaaaagccagggaccaatcacacatggcttcacatcacatgatgcagtcttcaccacccaagagagcacaaccgccctccctgcttccttgtaagaggtcatgtaggcagacaagaaacaccgcctctaatgggccagatagcccaaggccatgagcagagcgaatacccactatagaaaggtacgtagaaaatatcttcaatgtcttgggccttctgggatggtgctgccagtggctgcaagaactttcagagtggaataagtaagaaagacaatagacaaacacagataatgaatgaagctccagggtgccattgaagcctatgacaagctgccatgtggaactgcatcccaacttccacctcaagaaatttggaagccctcattttattaatcagggacaggagatctcagttcacccattaagtccatatctccaaggtttatcactgtgactgagtgaaaaccaattctacttccttcttggaaggatgagttcctgcattcttctataagcactggctgaataaatatcttactgccaaaagctaaatagtctctgcaggggtcacaagtccaggaagtgccattctaaaactttctttaggatcttcggtggtcagattgtctctgtccttgatgcatgcatatctggaagggttatcctgggatatgttgaggcacttgcctggaagacgtgggaatacttttccttgtggtgagaaacattttatgtctcaacctgtcatcctcatttccttctctgtaatttcagcctgcttcctcatcactaaaacacttcctgctcaaggtcatccagtccatctaaattctacacgtctaagatctagtactttcccctttcctcatacagagcactatccatgagtcactatccattgcttgagtgattccttcaaggcctgattactaagaatgcttcttaaaacctcaattttagggcctaaggggatggtttagttgacaaagtgcttgccacagaagcattaggaccagagtttggatcctcagattccacataaaaatctggaagaagagctgggtggtggtggtgcacaccttcaatcccagcagaggcaggcggatctatgtgagttcgagataagcctggtctacaagagccagttccaggacagactccaaagctacacagagaaaccctgactcgaaaaacaaataaacaaacaaaaatctggggaaatggcatacagctctaattctaccactgggaagccagaggctagaggaaaaccaatgggcagctagtcttcctgaatggcacctgggtacatccacatccacatgaaaacaaacacaaaacactcccccccacacacactacacacacattcacaaatgcatgcacacacttgaacaattaaaattcaatattgtagagtcttagggaatgttcccccttgcaatagacacagctccttttccaggctcaagtcactgtctttgagacttaaagtgttcaagtctaagaactccagaatcaaaaaattatcacaaggaactcaaaaaaactcactcttgtggtgatatattgtttatgatctaataaagcttgcctgaagatcagaatgcaaagctagccatagccatagaagccgggcagtggtgatgcacaacttgaatcccaagactcaggagacagagacagatggatctctttgagttcaaggccacactgggctacatgagagtgaatcaatctaaaggataaacagagctcacacctttaatcccagcactagagagaatataaggagctcagtgcagtctcagaagcagtctgagatttgttgaggagcagtgcagtctggagatgcaatctaaggacaggatcgcccctttggtctgagcactgatagaggtgagaactctggtggcttggttgctttgctccatgatcttcagcttgaaccccaatatctgtctctaggtttatattattcgtgctacacactcttttaagtgattgaaaagcaaacaacaaaaatgacaggttgcagaaaaataaaacctcccttagttttgtgaaactctgctaactcagatcagtgtctactgttaacaatgcttggcttgaatattttaggtctgaaagttgcttacagaaccatcagcgtctctctctctctctctctctctctctctctctctctctctgtgtgtgtgtgtgtgtgtgtgtgtctttacctcttttctatttccttcccccttccctcccctttctaataaaatttcttacttaaaaaaaaaagaaccatccacatggggaaggtcctaggcctgcccaggatgatgtggtagactttggggagcccttttaagggccttaccctgcctggggattggaggggggatggctagggacaggtgggatgttggggggaggggagggagacggagaagggattgacatctgaagcaaacttgttcctaatttgaactaataaaataaaaaaataataaaaaaattcacacctccaaaaaaaaagaaccatcagtgttccagacccctgaatctgtgtgtagcctatgagcaggttgtatagagtccagttcctaaattttaagctgttgtaacttccattccgagcacaaagaccagaccaactatagggtcttttgtgttgatgggacacaaaaatgaagagatttcactgtagaggggaacatcagccaatcagaagtgtgaggattatcccagccagtccaaaatgagcagggcagatgtagtcattagcactgtttcccatgaacagccacagcctttcacattattctgtgctcgcctgcgcgcacatgctgtgcctctctggagaaagagagccaatgtctctatctgaaaatgtctgttaatcacagttttgaaaaacatattttagcaaaggacagaaacactcaccaatgtagctaaaatgagaaagggagagaaagagagaggcagacagccccctgaagccaaaacaactcagtgtgggaacagtgtcatgttgacacatctctgaagcccagacgatttgtaaagtcatcagaaatgagatgatgtctctgattaccattgtgatttggggggtgtatttatcctttggtagaaagtctgttcaaacgaattcttccatacaaacactgcctgtctagcaattattcacaatgatcttcataaagaattgagcaaaggttatctttttttttgagcatcctgaattgaagacggacatagatcatcacatcaatatttaccttttgaaaatggcaatcactgaatgactatctaaagaggttaagaaatttcaaatagaacagccaaagatcagaaaaacaatgaccttgggaaataccattgagcaagtctgtgaattgggacactatggttgggaagaaagaagacaaagaaattagattctcttaggtctttatccatccctcaagacagaatagacctgaaaacagcattggtctttggtagaccagttgtccataccaataggctaaacatgttcaaggatagtggtctacagattacagtaaaccatgttaatagaaaattaaacatggtaaagagctcaaagttacccactagacaccatccagcaccaaatgataagcattgtatgatctgcacattgtatgatctgcatattatacaaatgcctacatacatgcaaagccttgttataaataactcaattcccagctgcacacatgcactacagagaaaataagacttgcaaatcaaatactcctgcacttgggttttgtttgaaacctaatagcagtctcaactgaaatggtaattatctggtgttcggtatatggatttacaggtgggccctaaagtaaagatggctttcctcagtccatgactgaatcgtcgcactggctttagagagaacaggggatgtaggcatctagactatgggaacagtccgctataggagggaaggcatgattgcaggagcaaagggcagtagtcgcattccatctacagtcaggacacagaaatgaatgctagagctcaacttgcttcatcctttttatttggtctggaactcaaatccatgaaatggtgctgccccgttcaaactgggtcttccctcatcaactaagcctttctaaaagcactcccacaaacctatctagatttgtgtttccatggtgattctaaatcccatcaagctgacaatcaaggttagccatcacactttgcaatgagaacggtacacctcactgtggagcccacatatctagtgcctcatctgagtactccatggattcctctgtgctttgtaacttcccagtttgctcaggagtcgcctcctctggtcctaatcatgcccaccttccctactctcctcctcagctccatctcaccacaagcttcatgtactcgcttccccccccccatcatgccctgactcctggaagtcccactgtcattgaaaccaaggacatatacacatcatgaagcttctgaggcccatacaactggaattgcacctgcttgaagaaaaagtgtaaaaatctcaatggaaaattataaggaaacccttggagacgatctgtgcaggggaagtgactagctgtttgaatttcatcagcttctcggtaaatctgcccctgaatagaactccatcatccctgaagacagctgtaaaaggctctggctggtgttctgagaagcccatccattttcacggtacttaagacttgttttctttgaaaatttgagaacttaataaatcttaagtgtgtttatgcccataagagcttgcaatcaatatctgctggtgtaaataataaaaccaatgagaagatgggttaagagaggccccaaccctctgatgcatgaacgttggggtaaaagaaaagtaggaacccaattattctgttggaaacagctgcgcatacacatctaccttgatattaattgagacagctcctaatccttcctttgaatttctaaaagcaacaaactgacaacaatattggcaatttcaagaagccaaactcggaggctaagtttaggatagaaggactaaagtgcgtggggacattagcctcttcctacattatccacggaatcctcaagctgcctgccccacctcactcctgggttcttatctctcctctcagtaaccatacttatgctgaagcatgagcaagaatcatgatatctccaaatttgatcacagccacattactccacaagtgtgtctatccattcaggcaagattgctgaaattctacatgtcttccataataaaaattcattaccttaatttaggatcttggaatccaagatcaatgtttgacagagtgggttctcatgcaggactacgagaatgttctttggagtatgtggggttctcaagccccttcacaggatgctctctgtatccatttctgtatctttgcccatgtttctcctctttcaaggacaccagctattctggattaggagccacactaatgacctcattgtatgctggataatctaccccattgtaagattgcgttttggtgtgctgtatgttaggatttgtgttggctagatttatgtcgacttgacacaagctagagtgaggagaaaatgtgtccataaatgttaggggattcacagggatgaccccaactaagaagccaagagtggtgaaaaggatgccattgatgcccttcccctataatgaaattgatgcctaccttggttaccattcctagagccttaatccagtaactgttcgaagcagaaacaggcacccacagctaagcactgaaccatactactggaatcaagctgtggaagaggaggagggatgagcaaaggagccaagatggggctggagaaacctgcagaaacagtggacctgacctagtgagagcatggagaccctagtcataaagctggggaaacagcattggaccaaaccaagccctctgaatgtgggtgccagctaggaggccaagacagtctttgggacctctaacagtggagccagtctttatatctagagcacaaatgaaatttgggagcccattccctatggaggggtactattgcagcccagatacagcaaggagggcctaggccctcccccaaatgatgtgatggactttgaaggtcccctgtggagggtctcactatccctggggaggagttgggtagtgggttgggggcattgtggggaacatgggaaaatggaagggcaagggaatggggggatggatatgtaaatatgaatagtaattaaagaataaaaaagattcaacattaagttttagaataaacagattatgcatacagaaaaaaaagatagggctgtaggaaagcctgcagggcattttcttaattagtgatgaatgtgggagggcccaggcactgtggatggtatcccccataggatggttgtcctgggttctataagaaagtagactgagcaaaccgaaaggagaaagccagtaagtggccctcctccatgtcccctgcagcagtttctgtctccattccctggcctgacttccttcaatggttaacagtgatatggaagtgtaagccaaattcattctttcttccccaagttccttctggtcatggtgtttcatcacagcaatagcaaccctacctaagacagggttccaacatggtttagggtggaggttgtgactcagatgtaaactgtttcctacaggcacatattttaatcatttcctctccaattgaggtacagtttgggaggggtctagaatctctttgaaggagcagtccagatggaagaattcagtcagtcagtgtgtgtgtgtgtggcaggaatgagtctctaagtcacatagcccactctgcctcttgtcccatctctgatttcctgtttcaacaggatatgattgcactcggttgcaccacaatagagctgcctgctgccttgccttctggttataatgaactatatcctgtcaactgtgagctgaggggaacccttactcctttaaattgcttcttgtcgggtatttggtcatagcagaaaaaaaaaaagtaacagacgcatacacattccaacctctaaccaggagtatccagctccctttattagacacatgaaaatgtgcacagccaaggcaatctttagcaagctcactgagcaagcagacagaacactaggcttccaaaggcatgtggggaatgaaatagataacagtaaaagatctggagagctaagaactggggatctgctgaagagccatcattctgaatttggtgaaagctaccatgaaaagacctggctcttgctggtgctgtgaaaatgcctggccttccttgtttcccttctcatccaacaacagttgaactggctaacgccaccttttcttacctttggaagatgggctagctttccataacctgataaagtttagttcttttaaataccttgatgctaggtaatttggggttcacagaataagaaggagggaccgatcacttcctgaggagtgtggtagaaggtattttatatctgcataaaagagagaactgcaaaatttgtgacgcatgcatcaaaaacacaagaaccaacaattatacaaaagacatctcacattctccaaagagccatccttggaatgttatcttcctgagagcgaccaggcataggggtcacaccttcctgtgacttagcatcttgtctcttctcacaccccccaaaaagaagacctcaacattgtcataacagaggagaagagagttatgtgatcatggcagaaggcagacgccatgtcggggagactcaatgacacccgcattgcacatggcagatacagcccctggtgaacagtgcttgaccacggaatgccaggacatggtaagaggaccctagcctctgtcacttctttccttccgccatcggcttacatgcatcttttggcctttggttgttacccgcgttccaaaatagaatttacttttttgtgtgtgactgctgtgggtgtttgggttcttaatttattttaaagtttgatttaaatttggaacctgtagaagacttttgacatttatttctgggggtgttttctgaggcttgatgaagtgggtgttgattgacaggctggttgccatggtaatagctgtcacggcagagactaaagctttatttcatactcttcttttgtcaggcaaaggtttgtggggtattttaaaaatagtataagtgcttcagaattaataggaaactgcttggcgactccttcctaacacacctatcagagcctgagattcttcttcattctccggcatcggcctgcatatatatttgtaactgtgggcttaaaacacgtgatctctggtattgttttctctcctggattgttcactccatcccctctctgataccagcacccctgcataatcatacaggtagacagaagtgatgggaaaacactgagctatcttcccagagcctcccacctagggcagccatggacttggtcacctgctcagctccagtctggcactacaattgttaacgtcttcgtgtcacagttttattctattttaaattatacttacttagtgtgtgtgtgtgtgtgtgtgtgtgtgtgtgtgtgtgtgtgtacatgtgaagatcagaggacagctttcaggccttggttctttgtcatgtgggacttggagattgaactcgggtcatcagacttgatgaaatgtacttttacctgatgggctatttctctgacctcatgtcaaggttttaaagagctggttcagaagatgtgaacacacatacatgattttaaaggagtgagtaagttactttagactaaagttaggtatattatttctcacttctaatcacttacctcctctctgccttaactggagtctggaaaagctggatataccattaaatgagatgcaggatttccaacccaaattctcatcaggcccaaatctcttatttctgaggacttgcattccccagacattcattatagctccccaaagcaattgaattctgaatactttccaaatatccctatagaaaagaaagaaaggcagaacccccacggaatcctccgctctgcggataatgaagagtgaccctcctctaaactcatcttcctatgaacctgaatccaatcatccattttctttttaaaaacaagtccctctttgtgctaccccccacaccagcagagcatgggaccctgaagagtctagtcggcaggtgggtttccaaatagagttcagagtctgcgtgtttgcattacctcgtatttttctggctgcattcagtttctgctctctttttattggtcttgtttatctccctcttacatgaatttcaaacttttcatttgtttaggaccatcatccagacccctgctgggaaagcaaatttttccccttgggaatgctttgggttttctacctaaaaaaataacaataataattcatagcttggaggaagtaacaagagatcaaaatgggaatatgttttcatgaaacttccctcagactcctccagtcccctggatcatttcaccgaaggggttggaggatggtgtttctcccttacccagtactttttatgtgtttatgacattgtgttgtgtgaaaatccacttagtagattaaaaacgtttatcatattttctcacctactggaaatatccacctaagatctatgagctcaaagaaggtcttaactgtgtgtgtggcaaggcacaatgtgaactttaggagcctttggtttctatgttagatttacaggaagaatgggaccaaatgaaatacactactgaggagtggacttagttgatcccatcctctcttgcctatggctcaagttgataagatatgggggccaggtaaatgggcagattttctaatttgacttacgaaagtctaattaagttcaggtatatactatggactgaaattcttggggggaaaaggtattcctgcttcagaaggctggttgactgattaagactctataattgtgagagttggaaagttaaaggtccaaagcccaattcccttgggctctctttagtcccctgaaaagcaattccttgcccacctgtgtctgacctaatatgcttgtgactatcagctaaaaccctttttacaatgtctccacttagtatcccattgtatccatcaattccatagctctggacattgctagataacatctgagacccatagcagagatttctaagctttggtgtccacctcctcatgttaccatcaacatatttgaaaaaataccctgatttatactgtccttttcttctgtagccataaaaaccacatggaaccatgtctatttggaatgaattacttgggggaaaattgaatctatgttcccaggtaggtcttggtcactcatatttgactcaagaactgactctgaggtgacagaaatgttttgttctgacagtacaaatcttaggtaaagatggtgggagaatgaaagatgctaagaaagtgaacaaatgataatattagaataaaactctatcatgcaaaaatgctgaggaatgcagaggtaagaactgccatgatagaaacttagtacatggaaatgactaaattcagttgaggctaacatagttatatctgcatacaattacattgccccacagctggacaaagctatctactgcaaagactactttacagcaaggtattagatacttcttgttattgagtggaaatggcaaaatgtctgaaaccctttctaccatcctaaagttcccaaagcatactatgtcaaatcgtctaaaataaaaatgtctgctcctaagagagacatacatggttccctggagaaggggaaagggacaagatctcctgagcaaattgggagcatgggaggaggggggagggagctaggagaatgagaagaggagaaaaggaagggtgaggaggagatgagggagcagaaaggttgagtcaggggaagaattgaagaaaacaagaaaggagataccaaaatagaaggagacattttgggtttacagagcaatcaggcactagggaaatgtctggagatctacaaagatgacaccaactaacaatctaagcaacagaggagaggctaccttaaataccctcccctgataatgaaattgatgactgacttatatgccatcctatagccctcatccagcagctggtggaagtagaagcagacacccacaactattcattgcattgaactggaatccagttgcagagaaggatgagtaatgagcaaaagggtccagaccaggctggtgaaacccacagaaacagctgacctgaacaacggggaactcttggaccccagactgatagctgggaaaccagcatggaacttatctagaccccggaatgtgggtttcagtgaggagacctcagaaatctatgggacctcctgtagtagatcagtacttatccctagcataggtgtagacttggggagcccattccacatagaggaatactccctgagccaagacgcactggagtgggtctaggccctatcccaaaggatatgatagactctgatgaccccctatggaaggccaactctccctggggagcagaaaggatatgtgataggtagggtgttagtgaggggggggtgtaggcgaggaggggaaggagagggaactgggactgacatgtaaaacaatcttgtttctaattcaaataaagaaatctgcaaaaagaaaaatgctgtcttctttgagctgggctttctctggcttcttgggccattctgcttgccattttatgaagccagcaatttaactgagactaagtctcctcatctttaaagtaactccatgtctagcttaccatttctggtcccacttagtaaagcacagataagtctcaaactgaatattctgtctttgttttcattctatttccccttctataacttctaccctccccccattagcacgccattatcaccatcatcactgtcaataccgtcaccaccatctcaatcaccaccatcatcatcacatgtcagcctcaccactaccaccatcgtgagcatcaccaacaccaccaccaccaccatcatcatttttgtcatctcgacagagagaaataattagcttgaaatcctgttttagcacttatctctcatagctgtacactcacaaataacttgccaagagagtcagacaaaggacctcccaaagtgtttctccttataggctctcttggaccctgctaattggcttcaaacttatgttccacttactatagatgaatctagtgtggacatgatcattaatggatgatcaatcttagtaagatatccatacttatgtaactctctttcgaactgtaaatcatgccagttgctatatacacaagtgcatgtcataccggtgatcctcataacacatggaaaacaaaactctggaaattcagtaagtggaactcctttactggggaactattgcgagagagagagagagagagagagagagagagagagagagagagagagagtatattgtcactttaacagagtacaaatcaataagtgatgtagggttttagttttttcataacattaggatgttgacttcagcaataagtgtgcgtgcagtcgatcaaaagtcaggagaaaatgttctacagcgcacagttgaaaggcttctcgttttagaaccccgagatccttgttcacgagttatccagcagctaactctctcattctgctctcttatccagggaagaggaatcaggacccacagcacctgtctcttcactgcaggttctatccagggaggggaaaacccaatacattacagtataaattacagtggccaaatcaaaaacccttaatgcactaaaaacaactcctctcagcctactcccactcagaagaaatatggtactgcaatttcttgctgctgtcaggcaagatcacatccaagtggcaccagataatgcagattctaacttggctgcttgtttacaagatccctgaagaaaagaagagtctctacaactcaaaaagaaagagtggatttcagctttggcaagttcattgttgggatcgtttgcctactttctttaaaattatagcaccagctcaaattagggtaggatttcccaccatctcccatctatgttgggatggacaccatatttaataggttggtgtaagcaagccatttcgattggagaggggtgtttggggaatggtgttttggagggtgcttgggggttgtctgtgtgctgggtcaggggtgtgagcatgcatttgaagaccaaatcacaaccttaatgtccttccactctcaacttagcctttgagataacacctctccttgagacccagagttcaccaatttaaccaggttggctggccaggtcccatgaacactcttgtcacctcctccccaggctgggattctaagtgtgtgccaccacacccggctgtttacacagtatgggtgagcaaatgtaggtcttcctgcttctgtggaaagcaagctcctaacttgagctccctcccctggccctatctgacatttttatggctcagttctctttcatgtatttggaattggagcggtggggggggcagtattttttccatctctaaaacaataatcaactgcgattttaaaaaattaaatattctgaaaactatattatgcaatatctaaatgttagctgatagtcatggctcctatcaggaggagtgaaccacatcagagataacaaaagtcactgatggcatgtgcctgtaactccagtagctcaggagacagaggcaggagggccacaagtttgaggacaacctgggggacatagaaatatcctgtcctcaaaatgaaacaccattatcaaataaaaccatacagtgccacttgtaaacccttccaggagagccatactcaagcccactaatgggataagctgaagatcatagacagcctgaaggcaggggaggtcaaagtttgctgccaaataacttttgtggccaaaatttaaagaataaactttttaaaatatgcattttttttcatttcagggctatagataatagattttgctttttgtttgcttttcgagatagggtttttgtatgtgactttggagcctgtcccagatctcctgggattaaaggcatgtgccattgggagaaaaggaagaaggggaaacttcagctgggatgaaaaataaaccaacaaacagatagataaataaataaataaattttaaagataataaataaataaataaatacattttaaaaataaattttccctctctttccacaagtcctgtaaattattcttgttacatttccttcttgaccgaatattctgactggttttctcttcatgtatcttcttttaacacacttgtcttagttttgtttcctattgctgtggtaaacaccccagcaaatttctagatttttacaaaaggtagaaagagcctctggcactgcccaggttacagggaagcaaggtggcagacactgcagcagccagtcacatgtacccaggtcaagagcagagagccctttggatgctggtgctctcacattgtcctctcctctctttagtccagggcccagcccaggaaaggatacaggtcatatccagggcagttcttcccactgcacttaatgtacccatgaagaaacccatgcccacaggcaacatgatctagacatccctcactgagacacctttcccgcataattttaccttgtcaaggggaccatcaaagggaccaccataactcccaagtgtctcccatgtttaggtcagactcagccataggaggaagaaaataatcccaacatagggtgtgaaaggcaactgtcttctgacagacttctagccttggcacacatcgccatccaacccatcctccaccctcgagtgagtgatcttctcaaatgaaatttcaatatgacagcttcctgataaaacctttccataattccccgcaaagaccgtatttttaatatagagtgcaaagctttgcctgagctgctcccctctctttccagtttcatcttcacacttagcacctgtcccattgcccagactgcaggccagccgcaggacaggcagctgcctcaatctacagctcacctctgggcttccaccacactgttcagcttgctgcactgccctcccccgaccactgcagatcggccaggtgagcaccactcacccttctccatcctcccaaacacttcctctctatggtgcaccgtgctcccttccctcttccccttcctctctatggtgcaccgtgctcccttcccccttcccttcctctctatggtgcaccgtgctcccttccctcttccccttcctctctatgatccaccgtgctcccttcacccttcccttcctctctatggtgcactgtgctcccttcacccttcccttcctctctatggtgcaccgtgctcccttcacccttccccctcctctctatggtgcaccgtgctcccttcacctttcttctgaacaccaacagcccctttggcatcagccatcacatgccatgctcatctcgtttccacctgtgctccttcactctgtgtgtacacatcctggtataacaccaacacaggctgtgagggggcgcgtgccagcttcctgagttaaaggggcctcctccagtgttctgccaacaccacagatgagaaagcactatgaaaggacaccacctggtgacttgaaagctggcggaatccgatcagatgtctgatttctaagagaaatggcggatctgttctctctctgtcattctcgtagaagaaggctaaacagtgtggtagtcacattcagcagaattctctgcttttcccctcctctattcactaaataagaaagaagcccaacagggctctagcactagactgtgatagaccaggccaatggggatttaaattgggactggaaaacatttaggcagaaggaaggttctggtccacaggattttcccaaaatactgtcctttcccactgttttcaaatgttcttttgctgcttttcttagtattgttgttttgtttttttgtttttcagatggtgtctcatgttgccaaggctagcctccatttcactaggtagcagaggctggtatttgaactcccgatcctctcaaattctgggatcacatctgtcaaatgagtgttgaaaacagctggtctatgtacctgttacaatttgatcttgaatgtctcttgaaggtcatatgttgaaaacctagtgtccacactggctggcaggaagccagtggaagctttaagaagcagggctgagtgggaggaagttagggcactggagacctgtccatcaaagggccctgggctccttctctctcccttttgcttcccagacacctttagatgagcagctctgccccagccgacatgatgcacagcctatgcacaagcccccaagacagggaagtcagcaggctcagcagagaagcgccttcaaatgtttcaacaacatcatttcttacaaaaccaacatctcatccctttaaagtgacatctcacgtgtctttctagagtgacagaaagctgactggtgctatgttgagtgctatgtgcactggtaaccccatgcacacaaaactccaggcagagaaacatttgtatgtgcaaggagacactgcaagaacagccctaagcatgctgacacctgcaggcattaaatgttcttcagagaggctaccaagcctatgttaccgcttaatttgagatgaagaactaaagaagcatgccatacatacacacatatgtatatagtctatttcattagaaggacacagcatgcttcactcggtctctggattgcacccatcctcgggcccagcacagtgctaccccatagaaagctttgaaagttttgcctatctaataggactagaaagtttcacttagaataaaagacatcattttactttaaaattttttaataaacttgtatttatgtgaatgtgtgtgtgtgtgtgtgtgtgtgtgtgtgtgtgtgtgtgtgtgtgtgttggtctgtatatgcaccacggaaatgcaggtgttccttgagctcagaagtagtcagatctttggaactggtgttttggtggttgtgagtcctcagatgtaggtgctgggaactgaacctgggttctctttaagaagagcaagcactcttagctactcagtgagctctctagtcccagaaaagcaaacctcttttgacgtctaccatatctatttgtctacagttgcatgtggtggaaaaaagtaaaattatttatgatgctgcttgtgctaagaagtttttattgctgcctctagatcaagggtttgatttgccgatgaatagtggggaataatagctaatagacctatttctaacccaactcatctcagaagaagattggagctaaatattttgactatcagacctggagaaaaatgctgaagtatggttaggggattaattagtatgggaaagatttaaaataatatttttgggttatgggtttggtaactaagttagctgaccttcctatggagtagcataaagcataagggtagtatgaagacatttgaattctttataggttcaattcttgttgtcctagaaataagagtttaaacctctataatttattctatcaaagtaactctttctttttcttctctctctctctctgagacagagtttgtctgtgtagctttggaaccagtcctggagctgcctctgtagaccaggctggcctctagatccctcctgagtgctgggattacaagcaccattctttaactccatttcttcattgtcagaggcccaaataaaatggccagcgctgtgatgtcccttctaggtcagtggttcaaggccatgggcagacagcatgtcctctcctcttttctcctaagtcccaatggtcctgggatggctccctcactctgtccagctctaatgagccacaaatatggggaatgccttgggactgtgtcactgaagtggcttatgagttcaggggatacttcacacttttccgtttctttgggacaaggcatcagcctttaagtagctttggtataatgaatttttaaaaaatataagtaaactagaaaaatctaacaaatcagcaaaccttcagagtgagttactacttgcttgtccatcagacatagaggtgctcttccacgctgcctggaaagttgcattgactcacagaggtttgtctattctgctgtgttatagtgaggacactgagcccttcacaataactcgtgtgtggtcacaagcactaaacgacaaagggagcaacagcctcgtccccttttatcagaacttcacgggtgacagcagccctcccggaagcagaattatgaccactctcttctatctccctcacgacaccactcaacaacacaagccgcactgccgattttggtgggccccagagcatgtgtttgcagaggaaaaagaaaagatatgaaatgagacggaattcctataaggtagtgctggaaaatccacagatcagataaacaccctaaatcagggtaaattacacactgcaggctggtgactgggtcatgggaaattatgaagctacatgaggcctcatttgttgtgctgaaaacaaacgtaaataaattactgggcgaatctcatttccatgtagaaattcatcccactgcatgacatgattaccgagtttttaaagacacttcgagaagaagtgtcactcattaagcctcagtcacaaggactgaaagatggggttgggggctggggagctggctgcagagacaaaagcccttcccacagaaacccgagagacagctccaagtcaaggcttagcatccacacaaagccaagtgcaaaggcagcccacctgtaagcccagtcctaggaagcaacaatgagcaacccacaggcagatctagacccactggttccaaactccagcttctaagagagaccctgcctcacaaataatgtgcaggggactgataaaacacccttctcccatccagacttccatagccatgcattcacatgcaaataaacacaaatgcacacatgcatgcatgcacacagtattcacatgtacatgcaaagtaaagaaagagaaagaaaatacagataagcttgatttggtgtaagcttttcaaagaaagaaaagtctactccttcctacagggagaaatgcaaatttcccccacaccaacacacttgcttgcacagggcaaaagggacagcctcatactcactcacagttcttttctgtttctaatgacccatctgctgttcctcatgttcagaataagcactccaagccactgcccagcagtggggactgtctgtggtgagagccattcctactctctcaccctgttccactcacaaattacagcagctggctggggttaatgggacagaatggagttaactggttcctgcagggatcaaacccatgaccaatgtcattaccactccactttgaccaagtgagctgcaaatccagggactctcgttgaataggaattggccatcaagtggcaccaatgccctgtgctaagcggctgctgacctgaaaaggcagatagaaaatacaggcgattgatgggatttgagccgagaccttcaagggcttcggtctggtgtcaggcttctcaccatgcttaatttatctcatccacctctccctgactccattcaaatcatccaggcaaaagcaaggacttaggaatcgggaacaaacagagttcaagaccgctcaatggaaggacagcaaagcgaaccagcaactaacaaaaagtgttgagacatggggctggggaggcagcttagccaggaaagtgcatagcccaggaacacaaggaccccagttcaatcttaaacagccatgaaaaaggccaggactgatgctgtgagcttgtcatcacagcaccggggcaggagagacaggggctctctgggactcactgctccttcagcctagctgaactgtcaagttccaggcaaatgaggaacttctccccccaaaaacaagataaagggccttctgatgaatgatttctgaggttgacctctggccttctcacacaaaggcagtccaaagacattcagagccctactacaaacaatcaagacagctagagctatggggagcagggggaggagacattgattctataattattcaataattagcatactgtgcaacactacttccccgtcaaacataacctggctaccccagtcccggcctctgaagtcagaatctgggactcaacgtcttttccttcccagctgtgactatgaacccattttgtagcccttcaatttctccccatccttctctccctccccaaactaaatacataccacataagaaagtagttgtgttttgctttctacacaaccattcctgcgcagggatacgatagtgtgctcaccctcatccacagcagactatttacataagcctgaagagctctgagagtttattggttaagggaaaaataagcaggccatggaataattatttttcattgtcccctgccaaagccactcagccaaaggctaaattgaactgctattgtgattatttgaactgtggagccaaaagtccttgctgtacagcaccccagctgtcctaaatttcattctgatggctagttttcattgtggctcagattctgccaggaaaaaaacatggtccccaaaataggagggtggaggattatttttccagacccatatcaatgaatggtttagggccactctgagaacttgatcattaacaaattgcttccagaaactgttatgacaggattcccgtatgcaaattgcaggccactcatacccacacagtgaggtgaggccattaaagctgagatttcatgttgcatgatatggcaaatgagcactccccaatgatcctcatggctgggaggctgtggcaacagcattccttgggcccacttaatggggatagggattgtggttgccaggcaccgacaggtacgtgtagtaatgagaagatttcaagactgagtaaaacggcccttttggagaaagaattgtagactcggttgaacatggcatccccagggttcagggtaatacctgcccattataggctttccactctatgtgatgggaagaaggaagaaggaggcagcaggttgactgctagcccaggtatcgaggttcttacaatttacctttcagtggataaactataaatgggatctgtacttcatagcacacagacctgtgaggtgtacctggaagtcacaggaaggaaagctgaagttgtggaggcagaaggaaggctcttaaaatgctcttggaaaccatctctgttggctacaaagatggggcagccacaaagattttcctgaagcctcagctgactcctacatttggtacgatgtgctcaacatgccctgaagccaggtcctcactgcagggacagagtcaatagacagagacagggatcatatgattgaaggaagatttttacagttgctggaaggacttgaaggaagataagtaagagctacttaagtgtttcgtttactaagtcagtttgtgcattagagttagatggagagataccttgctcagcctagacatggttggtggggtgcattggtcctgcctcaatgagatgatgggacagacttagtagacttcctaggggagcagatgggaggtggggtgcagggaggtgggaggagcaggagggagggggaactgggattagaatgtaaaaaataaatttaaaaatatactaaaaacaaaaatagtttggtttacggaacaataattactaatcaaagacagtatccacccaagttcaaacaatcttggaaatccccttctgtaagacacattcctggaacaagaccaggggtgtgtgtgtccttgtgtgaaatgcaaattctcctcccaacccttaaccctaagctaaagactggaaacaagggagaaagatgtcctctgagaaacgcagaaactgaagaaactggagcaggtggttacattgcaatcacagtcaggaaacacaaatgttgatactcaactccattcatcctgttttacttattcatcctggatccttggcccatgctgcagcactgcccacattcagtatggccctaccctctactcttaaagctcactcgagcacctggacagacatgcccaactgatgggggaggaccttctgtgtatatgtttgtcttattggttgataaataaagtactgttgtccaatagggaagcaagttaggtgggactaggagtcaaggaggattctgggaaatgtagtaaagagaagtcttgtgatccagtcaggaagagacatagcaggccaactcagaatataagcagggacaagcaggaaatcactctcttcttcctccttctctcttctctgtggagctgccatgtgatgctgaaaagaggacacattccgccagggtcctcaataagtctttataaaatatgtagattaagaaatcctagtcattggccagcagcattgtacctaacattaatgtctatgtgatattttggacgcccaagtggcagtggtgctcaggcggcttggcggaaagatttattgttacacccaacagtatgtttcctcagtggtgctaaaccctgtgacattgacaatcaagattaacactcacaaatatgtaatcaagacaacaaggtgtttcaaactatatcataaacctaaaagtggcatttggaagtaaaacggtttcctagttaatggttgaggtctaattacctttgtctttcaaaggtattttagagccatgtttgcttcagtctgggaaaggtggccatagtctgtcccgtagctgccacggttgatgctgataccataccaccagaggtcagcgccaacaggaaccttctgaggttccacccagcttggcttaatcccccatgaaagaacacactgtggtcaagagacagagtgctactctgtctttctagatcctcatcacttcccctgaacctagttaatattgccatcctctgcatatcccacactagacctcagaccttcctgtctaggaatagagaatgatgacattaatttccaaatgtttgtagcacacctacaatctggggaactattcttggcatctaccccttgcttgtctcatttccccaagtcctgtgatgtaggcactgtgaccaccccagttttattgctaatgagcaaactgagagcttaaatgtatttgaggttatccaggcaaacagcaatggagacagattttagagccttctctcacacttattgtctgaggaaagtgagacatgtagacttttagaaacattcccacatttgatcagctagcaaaaatcaacacccacatccaggaaggattgctctaccacgtagccatgcttaaaatctctccttcacttcctacttcccttgactgagacccccaaagctagaagacttaaagctctaagaaggtacagtgctgacagcaaaaggggctggttggtcagccttggagcctagaacatcatcaggtttaaaaacttattaaaaactccagggaattgagggcaggtgtccacaggaggcttttgttttgtgaaaacaaagcctggcttacttagcatatgttcccagagaatgagttttgccagtttttagtcattaaaaaataaaagctcagtagggtgacatctattttaaataacttcagccaagaataaagcttttttaaattattttttagaaccctgaataaaatcagttcaagacttttagctctaccttttggagtaaatcaatacatactacagaaaaaaaaaataagtgcacaagaaaatgaacttggtttgaccaaggacagtgtgaagagttaaaagatgtccagagacaagtgaaagtctatgtcaatgattttcaaatgttagtgttctttccacctgcctgctgcatgcatatttgcaaatatggtccctgtctccattacagggcccaggaacagaaactgggtggtaactcagtagcaggacactggcctcacattcagaagaccttgggttccatgtccagtaccacaaaaaaaaaaaaatccaaaaacaatcagagttgagtgtcctgaaaataattatgaatgtccgttacaccaacacattatctcaagactgaaccaaggcagtgtttggaaagtttttaacatatgtataaacagtaatagttatcctaccgtttaaaatccagccatgataggctgttttccttgtgtctgttgttcctttcatacaatgttcctatccagaataatatgttgttggagatgagaagagacggctggggtggaaaattctggcagagcataaagaacttaggctgtgagcctgcacagcaaacaacctgtgccccactcttcctcagtgagtttggctgtttctggggactttgcacattggctttgtttctctgacctctcatcttgcctgccacagagccccagagaactttctgcaactcgtgacttaattccgatctgagctgggagcatgaaaagaacctggcagctgcctccttcctgctccagcccattggccaagtggggtgacagaaacatctttccctttaagacacagaaagacacgccaagaaaggcttcatttccgttcaactcagcagagcctaagagccacaccagacatgcaggcggaggaacctgcacatggaaacagttctaagaaccccacttgctattaattaaagaccccagaagatgtgcaggcacctggaataagtcacttccttgcaaagaatcttgggttcaggcgaggcttttgataattaaacagaacctcagtcagagtatgggtaaaatgatgggatgttttgtagttcatcacatatgtggcttgtctctaacgtggactgtttatgggtaacctttggggacaaagccacctaagaaatcagtaacccccacaaaagtcctgttgatcattaacaacattaactctgtagcctgcaatatagtgttactctcaaacagtctacactgccttaaggatggtttaacaaaaagcattccccaggggactctgctgcttgagaaattgcccttctggatggcctccctgcccctgtccattgtcacccgactgccccacacccagagtcaaaaggttttatccaatggctgattttctgcaatcacataatgcccttttattttctaggttttactgcaggctgaatctgcagagaacaattggaaagatacacctgtaaagatagtaatttcatattataggtaattaaaaatatttgaccacaaagcttccatgtttatcctggtctcctaatatactgcccctaaaacaacttcctaatgactatagttattcttggaaaaccacagacaatgattttgttatggcctccggtattctaaaagaaatgaagatggcttgaatacacattatgaatagaaaacatgcacagaactttgcctggcattaatgaccccatgagagaagagcagcttaccaaagcccactgaacattccactttgtctcaagcattcctcagttcttaccacccttacaaaggggacttggtataattagaaatcctgtcacattaggggccctggagtctctcttccaccatattgttatatatttaatcgctcatgccagttagcaacccaattatgttgtctagaagtggagaccaacaatagattttagtatttagacaggaactcaaactgcaagcagagagccacaaaccacaccattaaattggagttaaaactagacatgaggcagagaaaggtctggtcccttcattagaccactgtgtgtggagggaaagggaggggagggcaagggaggggaggggtgcagaagagaggtggaccctgtgaggcggcatgtggctttccagtttaggctggaatttcacaaaaaccaagggataaaaacacaacaaaaccaagaaagaagaaaacacaggatggcttgtgagtgtcaatggctgagggaaagaagccttctctcaaacagtgtcatctgcacatgatcccgtggccacttcacttgtctctaatttgtcatggcttccagggtcctctaaacaaagtcttagtttgagtatgaggtatgagaacagcaatagtcaacagatgagtatcccctttttttttagaaactgaaacaagaaactaaaagccctgtggtgagcccttgcttctgaataccatccttagaatttatctccacccactatcatcttcaccaccgaacaaacctcctctcagtagaagctacaaagagagatggactttgctgtgcagcatctgatttgggacccactgaaataatcagctcagcctccattgcctttagctctccacacacagataccaagaagggcttcaggagtcacacaggaaatcctgagggtgggtattggcaggggtctcttccactgagaaggatcttccaatagaaaggcaagagaacccacaggggaagcagtggcttcagtcatacctgtggaaaagtgtggcagatgacattggagcctgagacacctgtggaggccagattcaccgagacacctgacatcaactccagaaggagagctggctttttagctgggcttgcaaccctgcagtcctcagggaaataatccctcctcagagaagcatgagaaaatctttggggtagatgctatgtcctcagagatagcaactttcagtagtctcgttactaaatgtacaagtagctgccctggcaaaatctaactggcaaagaatatttttttttaattcctgaaaaaaatgtaccgagttgcaaccatagcttataggttcacatctggaccacatcgtgacactgactgactccgagaagaatcggctaatgactgtcaagtgtctatctcagtgactctcaacctgtgggccacaaccccttggggtggggggcaatgaacaaccctttcacaggggtcccatatcagatatatacctaacagttcatgacagtagcacaattatagttatgaagtaagcaacaaaaataatatcatggttgggggtcaccagagcatgagaaaaatatatgaatggatcacagctttaggaaggttgggaaccactggtctatcctgtcctgtgttctgactaagccttgtcaaagtctattatgcccttccttgggaaaacactaaatattataccatttacccggcttcggaaagcaaagccagtgcccaaagctacttccctcaagccagtccaaagaatctattcatttcttcttaaattcaggcataattgtgtattgtcacaactcagacaataaaaggagtccccccccccaaaaaaaaaaccacagagtcagagacaaggaggtaaaccctaacctatatctttggcaccctccaagacttttggctatagtttacctgtgtgaataaaaagaacctatttactacaaaaaaataaaaataaaaaataaaaaataaaacacccatgggcaaacccacaccaactaagaaagtggttggcttttatatgattatccagctggtgggggagtgtaaaaagcagagggcaggaaataggaagcatcattgattagctgcccttttggaaaagttctgtgaaaaattccttccttagccgcactaactctaaagccataagggaagatgaacttgaacagctagccaggaaccccagcaggccccacagcagcagttcagtcttcaaacactgccagcaagggtggcatagaaggaagaaaagacatcaggctgcttctaaactgcccaagtgacacaacaggtccctccggttgtcacaaagctaattttctaatacactgcaaactgtgtactatagagtggagaaatatgactgggcttagtgtccgttcaattttctctggagcactcagctagaccacacttggctttaactaccgctagaccaattcattaagaaaaaagggtatatagacttgagccagaatatttatacactgactcagaaacaatctattctaggggacattttcccaagccaaatgcactacagggttttcctagtcatacaatccctggtctggttgctctcagggcccttgcatggggagaaaaggaactgggtccagaaaggaaagggcacgctgaccaacaagggaagactgtctccagaggaatgcactccttagcatccactccttaagtaatccaatttctctggttccactaatttccaagacaactaatatttatgcagttccgacctctcattagacaagcatttccagggttcaggattcccttttgtataccacatggcagctctgaggcactccgtgtctaggatgctcctgaagtcagaggtgaatgaggggaaaccaaatgtggtgggactcactggcagttccagtccttagaagataaatgatagacagacttgaactatgagttcaaggacatagtggcctacacatgattacaaaaccagccttatctacatagtgagaccccatctccgaagcataaagtttgggggtgccacttagcacttagcaacacagcccttgcctagcatgggcaaaaatctgagttctgtatacagcacaataaaaccaaagtgcaaggagagaagtcaccccctcacaggtacactctagttaaccacctcaaaccagagcagccagaacaccgcttgctgcttctctcagaggacagaaaacacctcttcacccaccttgatctcttaccacagatcacatgactctgaggcacacagagataaagatgcattaacaaaatccaatcattttctgacaaccccaagacctaaggaagctatggcactcagcatctataaattatacctgataaagatgctcttaagccacactgctgcccaacaggaggttgagtggccacatatgtagccattgagtgcttaaaatattgttgcttgggtttcaaaaacagtacccaaaacataagctctctcattaatatttggttatacactgaaatggtaatgtttacagtaaataaagtgatgtgtgtgtgtgtgtcactatatgcccaaaccagactctaatttctaattcatggttctcctgtctcagccttctgagttttgggatttacaggcatgtccaccattcctgacttcagattacaagattaaaatacaagttatttccttccctttaatttttatattttagtgtgtctactagaaatttgaaatcaagacccatggctcacagtgtgtttctgaggaaaagctctgttgtgtagcagagcttggcaaactatggcctgtgtgtcaattctagtccccaggctgtttgtatgcacactggtttggatgtgaagtgtctcccacagcctcgtgtgcttggtcacttattccccagctagtagctgtttccagaggctgtgagacgcttaggggatagaatctaattggaagaagtatgttgctagggtatggatcctgggggttacagcctaaccagtttcctacctgaccacctcagctctccctagtcccgcagttcctcctctccctttccttctccccctcctactctcccctccactcatccactctgagatacagatcaaaccaagggctttagacatgctagaaaaactcagtgactgagcttcaatcccaccccaagacagattattttagtatttcaaactactggacattatagttgtttgaagcacagatagagtcaaacagcagattctgaggaaatgccaatgaaacttcaaatcctgagaagttacccacaccacatgcaagattctatgaagatgtcttgctgtttgtcttactgatgtttgggagatctgggtgccaggactctgcagtgcatgttcaaacacaagtgaaatttcatgaatttccctccaccaagagcatggaatagacgtgttctccttgtgtctgagcggagagcatcatccactgcacatcaaacggatgctctctgtgtttccccgaggatgctctattgtgcggtaagtagttcccacggttatatgtacaattcctctgctcggatataaaagcaaaacctgttcaatggctttcctcgttggtagccttaagcatggatggccccttgtagccaaaagttcacagcaacccatggctaaggctactgcatggcagagatagtaaaggagtaccccagtaatcatttattgatattggcaaagcacccagcaacctcattagcaatggccaagtgctggaggagaaatggccatcactagaacagagggagggaggacagcggctgtcatgacatagcccttctccccacaaaacttccatagccattcctgcccaaggcctctcgactgccttgatagcacataattcattctctactatggagtctcagggccatgtatgagtacatgttggtgtgtgtgtgtgtgtgtgtgtgtatgcatgcgtgtgtgtgtgtgtgtgtgtgtgtgtgtctgtgtgtgtatgtgtgtgtgtgtgtgtgagtctgtgtgtgtgtatgcgcgcacgcgtgtgtgtgtgtgtgtgtgtgtgtgtgtgtgtgtgagtctgtatgtgtgtatgtgtgggtgtgtggggtgtggggtgtgggggtgggggtggtgtgtgtgtgggtgtgggggggtgtgtgtctgtgtgtgtctgtgtgtgtgtgtatgtgtgtgtgtgtgtctgtgtgtgtatgtgtgtgtgtgtatgtgtgtgtgtatgtgtgtgtgtgtctgtgtgtgtgtgtgtgtgagtctgtgtgtgtatgtgtgtgtgtgtgtgtgagtctgtgtgtgtatgtgtgtgtgtctctgtgtgtgtatgtgtgtgtgtgtgtgtgtctgtgtgtgtctctgtgtgtgtgtgtgtctgtgtgtgtgtatgtgtgtgtgtgtgtgtgtgagtgagtctgtgtgtgtatgtgtatgtgtgtgtgtgtctgtgtgtgtgtgtgtgtgtgtgtgagtctgtgtgtgtatgtgtgtgtgtgtctctgtgtgtgtatgtgtgtgtgtgtgtgtgtctgtgtgtgtctctgtgtgtgtgtatgtgtgtgtctgtgtgtgtgtgtttgtgtgtgtttgtgtgagtctgtgtgtgtatgtgtgtgtgtctctctgtgtgtgtgtgtatgtgtgtgtgtgtctctgtgtgtgtatgtgtgtgtgtgtatgtgtctgtgtgtgtgtgtgtgtgtgtgtgtctgtgtgtgtctgtgcatgcgcgcgtgcacatggaggctagagaacagcccggctattattccttaagcacatctacactggtttggattgttttttgagacagtgtccctcactgacttggaactcatgttgtaggctgtgctagctgtccagcaagctgaatctccctactcctgctcccccagtactaggctagcccataggcaccatgcatccatcaccacatcaggctttttatatatgggatctagggactggccacaggttctcaaaattgcaaaggctttaccactataccatttcctgtagcctcttaacccttggagctcagccaggtgagagcagagaccctttctagatacaagtacaattgtctcttggtctttgcctgtgtgccctctcaattgtctaaactatgtttacatcagagtcgcaccttggagtttttccacatatgatcaactgtccaatgcatatctttttgaaaattaccttcatgtcctttagtcaatgttttagtcagattcaaatagaaccaagggaacttcattccctaatttggctcagtcctgtgaaccagtaggggatttgacactccgaaggcacccacacgctgggtacagaacaattgaacacattgtttggttgtgtaggaatctgacatctgcctcctgcctcctgagctgaaagccaactttctcctacaaatccttttcaattcagacaatgatgggagccagcagaaggcacaggagccagttcaggagccagtggtgtcacctgggtcccactccctggctccttttttcatgatcagagaccccataaggacaacatgggaacaagctattcattaccaaaggtaacaccagcggtccttctaatgacagagactgggaacaagccatcggtgatggaacatcacacctcagaggatcagaaagtaagattccctgtgttgtgtagaacagatggagagccacaccttctatctacccagtgactattttcaacttgtccagagcattttaaaaggtcacctaatgaaatgccaaatcttccttgttgatgaaacagactagccttgagctcaaatcccagtggattaatggcatgaccatggccagctttctctgtgtgacttggcctggatttcatcattattgaaaggggattcaagatggctgctttattaggatcgctgttggaattaaacagatcatacaagaaaagtgcgtagcaaagtgttgagccttgggccaagtgaaatggcttagtggggtaagagcactggctaaggccaagcctgatgaccaaagtccaatgcccaggccccagagagtggaaggagagcactgactcttgccctctcattttaacacatacactgtgcattcatcaccccaataaatagctgttatctgtaaaaagtgctgcatctcccgaaagttcagctgctgttgctcctcccagtcctgatgggtaggtgagaaaggaattgacaaatgacgaaaacctttttcagagttgccaatcacaaacacagaacagccttatgttcttactgctttcagttttctccccctagtaagtctcaaataaataaataaataaataaaaataaataaataaatgagcacccccttctaaagacatctagccacataagataaatatagaagtttttgttgttgttgttgttttggttatcccaaaaactttttaaaaattaaaaacaccagctattatgtaggggatggtcaggaatggccacagagctttcccaaggcatcctaagtggtacttcggagtcttaaggacacttgggatagccttattagtctaaatagcatgtgggcctctagccagcttgactctgggaatgaacaacacacaaagccatggagcctgatgtcactttctcccctaagcagggtgggactacctgctggtgctggctcttctcttgaacccagttagaaaatgcaggccatcaagaacacatcacttctaccaaaggattcacttctgggctactcgccctggacagcgtggctgcatatgctccacggggactgggtaaggtacagacagagactgcaggaaccaaatacctcattttccatgtaggggttcccagactcccaagattcctcttgagaaacccagattgggtagatataacatgtgcacatacaacccttttgaagaatatgttaacttttaggatttaactaaataatttcaaatcccctcttaggatttgaaacacttaggaaaccaggcttcatgcactgttttatgtctctgaaaacttcactattctctctgtttgtatctcagtgtattccagttgtccttggtgaacataagcttcaacaatcgggagggttttcttttgttctgttttgtgtttgtttgtttgttttcttaaccttgttgaacacctctgcgtagaattctgtgcatagtcacagagtggttaacataacctcatcaactctcacttgaatctgtaggccagccccgtgggaacatgtggaaataaacacactactcccaaccccacatatgcatacacatgtggggaagtagagagggagcgggcatgctgagcttggttttaatgcatatgcaattccttcataatctttgccttctctttgaagatcaggctactgggctacagaaacagtgagaaagcagaacaagctttctgtctttctgtgagagaaaaagtcactgcactgctgagttcaaattctgactcctctcctacttggatgggacaggaagccattgccttgtctccctggcaacagtcccatgagggaaagagcagggaatgcaagagtcatctccataccaacccaccaaggagaagagggccctgtccatcatctgtccttgaggagggagttctcatttttctcaaattactcattttattactgaagtttaataagtaaacctatcagatgaaatttacaagtagtgatttgccaaatgaaaacaactttttttcctgatgagagttttagtttttttttttttataggatttttctatagtgatcaaattttcttctttctgtggtggggtgtcttcatgagaaaagtgaatatattttgtccccaacccaccaaaaaaatacttttgacaggagtaacaataaattaggaaggtttggtgactcactcaacaacacaaaccattgctatgcatttgggtatagataccaatctaatcagttgggctcctacccagactcccttgcacttaggctgagaacactgtggcactcaagaagtgtgagtgaggctgggccttggtggcacacgcctttaatcccagtacttgggaggcagagacagacagatctctgtgagttggagaccagcctggtctacaagagcaagtcccaggacagcctccaaagtcacagagaaaccctgtctcaggggaaaaaaaagaagaagtgtgagtggccccactctgctcagcctaaatagaggctcatgcacatccttggctcaaagaaactggtctcatcacagttatttcactgtaaagcacgccaagttatatttggggtttctggctagacattccattgtcctataatatactgagttatactcccctatgctgggcaacttcaatagctgagaaagtcttacacatagttaatgttcctctgtttcaacatccccacctcaattttagcttggttcggtgtccagagaatgggtgctcagtaaaagcatggaaaaaatattcaactcttttttataatatacatattaaaaactagaattgctgagaccaagggatctctagctaagaggccctgtagtcagaagcactgtaaaaagatcatagctgacaccacagttggtgaaaataacagcctgcaagctgtgccaaaagccctcttttcctcatctaatcccccatccttcttctgatacaagaccgccaacacactaaatcctttaaacattcattgcaagttggtatggaggtagttcagtgtgagaggagagagaatgcctatacacacacaggcacattcttccttagagataccatccacagttcaaagggagggggttcagaagagacctgaaaggattatttaatctacttgatcccacgtgtgaccacaaaggagatttgagaagtaaattttctatcttcgatcctctgaaagggtggcgggtggtgaggggagcagatgacaacacacacacacacacacacacacacacacacacacacacacacacacacacacactagtctctaggacaaaggctgcacacaggtttgtttctcttttctacttttcacccgccctgaagcaccaagagggcttggatctcaacactgtaaacaggcattgacaatcagtctaccacttggcagacttcagtgtcacagctaaagtccacacctgctccatttcccacagattctccactttaattagaattagatgttggtctgtgagtgtgttctaattttacttttggttttaaatcttgctttggcagtatcttcctacagtctctgaagagaataaccatgctcaccctaaatcatcaaggttatagttgaagcaacacaaccagtaggctctcaagtgacagtttatgatctgttacccaaccaggccactgtcatctgttgatactccctgacagcattccatctcaggctgaaagagcccatcactctgccaggtgggctcgctctagccagatatgtatttcggctttgataagatgtgtaattatttatattatggatagctctatttgtttttcttgagtcactcagctatacagtatgctgaatgacatataaatatagaaattatggaaatagagaaagcattttatccaatgccaatcctgagttgataaaatgagtcattccaatttctctcaagggtgtcatttaaaaaaaaaatctaaccttgtcccatataacaactgaccaccaattggctcaattcctaggaaagggggacactaaggtgtaactctagcctgcagcacatgctgtatggctcgaagacgtcatctaggaggaaaggaaataaatgtgcacatgcactaacatatgtacgcatgtacacacacataccaacccacacacatgtgcacgtccactacatgtaatctggattatatacacagacaacatacacatacaccccccacacacacacacatgtgtacttcacatgctctggcttccaacaacaataaaagactatacagagacttcattattctcttccaagttcgcactgctctcattcctgacctgcacacgccccgtctaagccagcaaacatggactggtgcaggtgtttgtaaacaagtacagtttggagttgtttctaattgtaagctgtcagagctaaaattagaaacccaatctgttcattttaaaagaaaaaagtgaagaagaataaaagctgttcagaggggtttattaaaaaggaagaggttaggaagctcagatttggcacacagaagtgaaccctggtgacacagcagggaattgctttgtgtcagcttctcactgcaccaaagaagtcctcttgagtttgcatccactgccatgggaaagacatcttctctgatattccactccacagtgtgcacacacacacacacactcacacacactcacacacacagctccctctccctctccctctctctctctctctctctctctctctctctctctctctctctctctccatcattctcaaaccctgacagccataaggacactcaataaatgagagaaagtttctacaattttagcgcccaccatcacaccccttcctgaccctccacacccagcacagtgagcagccctcaccaattgcagctatattgggctcaaggaacttgccataaatggaaaggaggaagctgggtccagttacaaagaggaaacttctctcttccatttatacaaacaatataaaatcaccagacccaacctgaaaagttggtgtcatttccagaagccatcaataataaatgaacacttgcaaacttatctccaatagaccaaaattctcggtcagacttcctaaaatgaaacccatcattgatgaccctgtttcatctcacaattgctaaaaagaaccttagacaacagcactccccagtacttttattaaaggtccattatcttaaccctgagttttaaacttagctatttttacccttattgtcattactcttttattgagccagcatctcaggaaaagaggcaaaagcatttttttttttttacccacatcctggctcttaaaaacacatacagacaacaatttaattcccatttctaaagaccgagtgttaatgctcttgatgtagaactgtgcccacacaggaacaagacagccgctgatgactcaggacaaactgagcataggggcaggttgctagaatcacagcagttgggaggcaaaggccagaggctccggagtgcaaggtcattctcagacatgggaagttcaaggccagccttctgcctcagaaaataaaaacaataaacaaacatgatgacggcagaaagcgctgaaggttcattagctgggaacatcaaaagcaaagactgtctcccacagcactgcagctgcaaccccatccctttagatacctcaacataaagctcagaagaagaggaagaatgtgcttttacctctctccttccaagctccagaagggctaccaacagcaggaaatagccaaaggtgaggaaagaaaatactaagcagtcctcaatgactaaactagccatgatccctctacagactcaattgctaaataaatcgatagtcacttctcaagttttgaactgcacagccaaacttgaagtgtaaaagcccaaggcctaagctcctcctcttctcacaggttaaagaaagaatagactcatgaattcaacccaccatgcccaccctcctctgcgtccatgtgggactctggcccagactgaccttaatgagaattcactggaagttgacttcagaataattaggcttcttcttgacttcactttctcagccctggcactcttcacaccccctgcatatattctcatatcctctttgtctgtttcatcagttagtaaactttactgggaagaccaacgtccagacctacaccatgagaaatcagaatagtgtgccccattcctgaaacaattaactcatctctcacaggttcccaatggtgagccccatgctactgttgaaatctaacagagtcaccctaaatccctaggctgacccccaactcccaggccagatgagccataaagtacagaagaagctgaaaacgacttataaccaggccatgatctctgatataaatgacacataaaaatcccagttcattttcatattttctgactgacactttcttttaaaaataaaataaaaatcctccccaggaaagtggacttcctactggaagcttcggcaagaacagccagcagaataattcatgggcagcaggttattaaaaaccctgacaggtattacttaagatgttagcagactatgcaggcacgtgtgtacacatacctccaccctctgtgcttgcagactcgcgcacacacactcacatttttagtaagtcctcattaagctatctgagatattaaaactaatcatggcagtttccctttaatgttatcctcagcataaagagaaatgagcccattgtcatttatttcaaaatcattctttataaaaaatagctaatcttcagaagcacacctggtttattgaagtggatacagagatgcagcatatagccttgatgtgctcatctagggaaatgcagtttttaaatgagcatttgttagggcttttatttgcaattgcaaaactacccaaggctctctttgtgaatgtacagatttctcatttcaaaacccacattaatataagacaattctcatcaaaccctaaaagcagcaaaggaaattaacccttgtgggactagacaacaaaaccaaaccgaagcccagtgccaggtcagaggaagttcaaaccccaggaagccattgacacagcgctgtaccacatcagcaggaatgcccgctgcagcatctttccacaaaaccgcctgactcatacacttaaagtgcaggaatctacaaagttggcccaggtattaaaatgaggcctgctaggctaattattaaaaagaaagaaagaaaactcccattaactatactccagaacttctaaaggagaacataagaattttccctaatctgagaaaagtcagccagtctctataaagaggtggccccagttgccaaggttgggctgtggaaggtttccatagcaagcgtgtgtgggagagtgtgtggctcttcgccatgttagcctggtgtttcctggatacgctggcaggtgtcacttttttttccatttgatcaggaaatgtaatatgtcttcaaaacaattttcacccaagtgctcagagacattcaagtgcaacgctggagcatctctttgcactttccctctgagacctgccaccccacactgctaggtctcctctggaacacatgtgaaatgtataattggtacacaaagtcttaggcttgtccctggaggactggtgggggcggggcactggagacagttgacggggatgggtgtgatcgagatgcactgactatatgcaagacatttccaaagattaaataataatgtgatataattgctcttcaaaagtgagattttaaaaatcagtctatatttgtttagagatttcaggacaaaataactgtgataaatgacaaaacaaacccaatatgaacaagtaagttgaaaggcatttctggtcctgataaagacaatatctgcacaactctccatgacctgaaggagtggaggcaaagtaatcctgtgtgcgctgtacattccttgacaaagaaaacctagaattgttccccagctgaatctagtggaataggagacgtgactacaactttttaaatttcactaaccctgtaacatccggcatagtatctgatgcaaaagaaaacggtgatcaataaatatgtattgagctgaccatataagcctgccctcattagaccaggaaagcatgatgaggaagagaatcctaaatggttcgttctccttcttgacctaacattcggtgatatcttcacacaagacacaaacatctttgaattggttagttcttactcatatttatagcttcatttttctcaagatgatggtgaactgtggagggatacaacaagaaccaaaataaagccggtgacagcacaaatctagggacaactccttcgtgggatagcaatctgtgacatcgctcaaaaaggaaagagaaaagaaaacctgttctctgattgctaagtattgactatattcatatatgtaaaagaagggcaagtctatgggaagaagtgacagagtggtcagccttgtgatatccacagcagagagtgcccaccaacagattaactcatcacgggcagccgacacctacagggacatggctgaatcacactatcacttcatttactcctcactgaccctctaactttatacccatcaaccatccatccttatgcatagttaagatgtgatttttctatagaaatatcttgtatgtcttactggccaataggcagtagaataaatagtaccacattccacccacccatccatccatccatccatccatccatccatccatccatccatccatgcagaagcctgggaccctcattcggtcgcttcatcaaatcaggctccaaacatcacatgcagatggttctaatccactgatttctcccaccttcactgtcaccactaagttccaatctacctcattcagtgaaccaggttcctaattttaacaggtagaatatttaggaaataataaacccatgccttaagtcacatcccttcacaccttcctgtctatacagttaagcccacgaggactactgttccagagaactgatagaaacagccttcaagaaataaggctttactcagctttaaccaaggggatgagaaggaatgctaaatcccatagttaagagctttggtttttctatgagattgtagtgtttgactatgggccaactagctcctgtacccaccaaggtgtcaggagaggtgaaatacggacagaagagaagctgcaaaccatgacatgtgtgcctgtacactttgctctggaggaggtaggcatgcagaaggttttccttactttctttccagaccctctgggaaggtgcatactacagtctgacctgtggcagtccagcagaataaaggcaggagaaacaggtaagagtggaggaaacctgaatctagtttcctagttacttccctggacttggtacagtaaggaaggagccagaagctcttgtgtgctccgtgggaggataagggtagttgctgacaatgacaactgacaatggccaacgtgtccactgaacgataagaactgtgggggttgtatcatattccagaccaacacagcaccatacttcagaaagccatgaagcagtctcctggagagaaaccaggtgcagaagaggacagccaggtcctaaccaagctgagttacaacagatctgaggtcatgagcttcagaatgcttagccaatggaggcacagaagcctggctaactagacaatgagtggccattcctgcagaggacagagaagagggctgggcaaagtacagaacaccccttgtggacataccaggacctttccactcatgccttaggtgaatccaactgggaaattgtctgggacagtccacttaaaaaaaatggggagtaaatgtaactgagagaaaccaggattaatgtttcccagctctgagatgacacaggagtggccacaaaaatgaagaggcctacattttgtttatacatctgggtgtggcatggggacattttgatcctgcccatctactgcattctaaattggtagccagagtagttttataacagtgcacataaaattatactgcatggaccatgaaaattcttctcatcagttagtgatcacaatcctctgtggctgatctacccttcataattaggcctccttccttgttgaaccaccctttcacaggcatcacctagggccatctgaaaacacagatatttacattatgattcataacaataggcaaattacagttacgaagtaggaatgaaaataatgttatggttgggggtcaccataactgtatgaaagggtcaaagccttaggaaggttgagaaccgctgccctagggacacagccttaggaaggtcgagaaccactgccctagtccccttgtcactatagggcactattctccaatcacactggtctcaaggtttctcaagctaacattttcttgatccagaatgcaacttctcaagtcctatcttcagtccaaactctactcatcatcaagtcaaaatttagctatctcttccttgtgcaatctttccctgtttggaatgtttatcctctgggaaattcctggacatacaaagcaaatgattccctgagtttttagaatcccagaaccttctctacagcaagttaagtctccgagaaagcagaatagatcagaaacagcttctgaaactgttgattactgtagcaaacacatgagctaatcaacaaataaggaggaaatagttatatggtttcagtctgtggttggatgcccctgtgcattttaggttttaggcaaagcaaatnnnnnnnnnnnnnnnnnnnnnnnnnnnnnnnnnnnnnnnnnnnnnnnnnnnnnnnnnnnnnnnnnnnnnnnnnnnnnnnnnnnnnnnnnnnnnnnnnnnnnnnnnnnnnnnnnnnnnnnnnnnnnnnnnnnnnnnnnnnnnnnnnnnnnnnnnnngctgaggtatcctggaagcaagaaaaggaagggcaaggagttgcagtctcactatcccttttgaagccaatccccacccccaaaacctaacttcctgcacatgggctgcacttcttaaagagtcttccagctcccagcaatgcttcagctagcacccacgcctctaacacacgggcccttcacagaacttttatccaaccctaacacatgggttacacttttctccacgtcacagaattacaatctagaagaaactatctggtaagtattgatttatgagaatcacagagccaagaaaattatgtcttcagagccctgggagtaaatgaagaaaatgaggcttcctggagaaatataatctgtatggtagacagaaactgtccggtgtcctcagaggtgacaaggcggcagcagaacaaggggaagggagggataagaagtgtgttcatcagtcttgctgagaagagacaaggtgtacaggggagtgagccccgtgttgcatcgaacgtgctcaatacttcgttcgctctccttccaagtcctaggccatgtctgtggcttcagctccaagcacgggcgtacctctggctttatcccaattacctacaacccatggaagccagactgtgccacccagaagtcacctttccaggcagccagaagaatggccccaggagaaaaaagtgaaactacataagcatggctttctctgcccagtttggaaagcacttcgttctggggtagaagtggcatcatttgagaaaaataagtaaacctatgtaagcaaatgcacaagaatgcctctggacagagggctgatgacattagccaggtgaagggagtcttgctgtgaggtgggtgggtttgaactccattaaagaaaatttaataacccagatgtcaaagaaccttattagaaggcaatcatacctacgtgacctcctgacctgggcctcaaggatcatgcatggtcatgtgccagaaggtctgagccaggagggaggaaaggactttctggcaacatagtttaataaatggattctttggcccaggaaagttgctgaagtagtaaaatgagatgcagttgaataaaatttaggttaaacatgagaaagatcttgataaaatgtaacagccccccaagaagtggcattgtttctagtagatgggctagagctcatctctgcgaggcttgatcagctgagctcgtaggtcatttggggacaagtcaagcttgcacagtgaaggagccagacagacagcatggggatgatccctcacctgcaggcagctgccagggaagccaagagtctcctcttgtgtgcaagaagctccaccctgagagaggcaaagggattgattgaggaaatgccagcctccaaaagtcaggattcagaatgaccctatggttgaaaatcaagatcctccatggagaaagaagaggtccaggccattcaacaccaaaaccaacaaagacagggacgatcttctcacatttcccctcctgtcctattagccactggcttcttcttaatctgttgatgtctaaatggtcacagcagctggactcccacagaaacaaatgagtcactgaactaaggatcaggctgtgtgagcatagtcagggctcagctccttgggtctttgttctttgcttctgggagacccttctatggctccctatgataaaaacatggacactcatggagacagttactctggtcaagggagatttctttggcctttccagttaggctgctagaggaagaagtcagtgagcagaatagacactgatgcagaaagaagaatatttttagggtgtgcatataagctgacaaagggaaagtgaaaccacggaagaaaggttcgatgaaagactccccctgacaccccccatatttcatattcaggatctaaggcctgcgtgctggccaagaagctgaagtcagcagttatgtgtcctcaggtggtttcgagacaacagagaaagaagtgaggaaacgggaggtgggtaagaccgggtcatttgataactcttggcttcaatctatggggttttccctttgggtattatcctaaagaaagctccaggcaacctcaggctggatcctcacttgtcacttctgaaaagtaaatctgttcatgcttgcaggggctgactctgctttggttcagattcacacgcaccttctaattataagaaacaggcttcttgggcttctccaggcaaaacccgagaggacgccaacattatttttgctgttgctgcaacctccaaattattttccatctgttagagcctcaaattaaaagggcaatgcttatgagtgaatgcttgcccactggtgtggaccattctttgctcgtgctcctgaagtgttcatggctcctccattttatgtaccaagaggtgagagagaaatgagccatacagaagcaaggtgggcccaagagacaagaaacctggcttagctcttggctgtgctttttacagctgagtggtcttatattaaaacaaaacaacaactaaaaccccacccatcagggcagtcatgttccccacttaggaagtgcacagatgtcctgagaaataacagtgacaagaagggggaagccacctgaagaaagtgtctgctctgatggtggaagaagacaagactaattatgcagaatggaaatatacctaggattttagagacggaaccctaaaactatgaagaaagtgtttgtgcaacttgacaagcaccacgccgtgaccagaatgactttcatgcagatacgtttttaagattgtttcttcctatccagagacacattggacagctgtgaagtcactgctgggatgggtttcacagtgacagaacaggtgagagatcagggaaatccccttttatgtgttagtggtcggtcggtcctgggtcctgcaaggactcttcattaggtcttgagtagaaaccatatattatgttaacagtagagtatgcccacccccctccatgtttctaaatatatatattatatatatatatatatatatatatatagagagagagagagagagagagagggagagagagagagagagagagagagagagagagagacccatatgtccaaaactaggcagttgacaatacattcaatacaatacccagaatctctctgaataagccacaaggcccctggacttcaccaaccatttcttcacttgctcgggggcaataaaaatttacagaaggtaacaaggatggaaatttgactaatgggtataattaaaaataaaggtaatttaagcggtttatcatgagcaatttggagcacctagataaggaatgtcacctcttaagccatagtccatgaaataggcatctttagtcagcaagagagcttcagcacattatggaacagaccatagaaaaataaactatgagaacaagaagcccctactttcctcttcattcattcttccttgctcactttaaaattgcatatcctaacacaattaaatcattagaaaagtgtgcgggttgtgttccattcacaggtgcctgcacattatttaaaagtgcatatgcactatgtttagatgttaacaaaattatttatttcattgcaaataatctgaatggcattgcaatttaaatggttggccttgctcctaaaatatggcggctttggggaagaataaaaccgtggaagaattcctttgtgctctttcaagagccactgaagagctggctgtcatcaccagactggaggcaacatggaagggagggcttgtcatgctttgccaagagtcagggcatttggagcctccctggtgggtcctgtgctacaaaggccctgtgtacagccctgctggaccagaagggctcagtccagccctcagcagctgtggagttgtcagccgtggcattctttacaaagctgggtggctgctcactgctgacatgttcggttttgagctctggaaaaaaaataaaacccctcactggaatgttgagctaggcaaagatagcagatgcctaaagtggggaaaaaaacaaacagtctttgtatatcaggtgctttagaaccttctggaagtttatggtggaggaggactaattttttccctctaagtttgcacttagccatttgaggtccttttcatcaaaacctctccacttctcccttctggaccttgacagccagagtagagaggatccagcaggctatcgatcattttttccttctaaaggtcatattggggggagcataaatgccaggcaaaccacacgttctctaaggaagatacacatttcatttgccttcacatttaacatcacatgggctttcactgtgattcagaaatgcccacgtcaagtctgggacaacatttgggggcattctctgaagttctctcaatcgcagggaatctacccaggacagggggctagggagattccttggtgggtaaggtgcttgccatgtaactatgaggaatggctcttggatccttagcacccacaccggtgctgaaccagcatggcagcctgcttgtaatcccagcacttgggaggaggagacataggactcctggaataagctggctgatgagacttgccaattcagctatctctgtgttcaagtgagagaccttgcctcaccacataaggtggagaacaagcaaggaggaccctcagtgacaacctctggcttctgcacgcacacacatgaatatttgcctcaacacctgtgagtagtcatgtgcatgtgtgcatcaccaacatacaccagaacaaaatacagaacagattctttgtgacaatttcctacacgtgactctaagcagaaagcacccaatgcatgtttagatatcttttaatagaaaagaaagtcttgccctgagagggttgtgttagcctgttcctacaactagttcttgctaaaatggtgtctatttaggtagtaacaagctgaacaaggctaatgtgtggctacgatggttattataaaggcgcctggccatcaaatatcatgccttcacaaataaagagacacaagaggtgaagaaaggtcagagggaaaaacagataagaaatcaatgtcaagagaggtcgctttatgagcttcaaagggagctgcaaccatcgattatgacactcagacaacacagccctgtgagatctgaaattgcacttcgagtctgattttatagaactcacgcagacactcacagtgattgcggcacattagcaggagctcaccctataggcatgattgaggtgggcacctgcagaggtagagccagttccttctggctttagatgactgggtgtatgattgggaaggcagcttcaattgcaaaggcatggctggcgataactggggccaaggactcagatgatggcatccccttgtttataagccatgagtattctgccatgcttttgtatagaataaagttcaaggtctttgaaggagaacaaattaggctcctttatcctaccaacaggcctctccatctcccaaatccaacataccctttgttggcctcagcctttactttttcctccttggcctcagattattttgttttgtttcattttagagatgaggtctcaggcatctggagctggccttaagttttcaagaacaaccttgaacttccaaccctcctgtctctaccaactgatttctgggattgcagacatgtaccaccatgtctggtttatgccagccatgtagggatcagaccctgggtgtcaaacagactaagcaagtatgctaccaaccaacctgcatctgctgcctgtctaaacctatgtattgacagctgattctcaattgctgacagcaaggaagctgctcttccatgcagtctctatgcaattcatttctggttgatatgccctctctgccctaggaaactttttccttcttcttttggctcatttcctcaccacaggagacacttggctcaccaaactctatttctatttctccctgggcactcaggtacactaccctccccagcttccctagttgccaagagatcggcatgactgaactccaaccacagtatgcatggaaaggggtatgacatcactggtcccttaaattctctcttgagatgctccatatattcattctttccctctcccttttccttccccctcctttctctatctttttccaagttgccaaggggggtcccatgtcccagaataaccacagagcagaagactctatagaaaaccaaaacctgcctgcccacagtaggctaaggtatgactgaggagcactcaaggacagcgaagtgcttaactagtccactgtgactaacacactcaaccagatagttaattacactttatctattgtaattatggttatttttgtaggttgccacacacttatttttggaagaagcctgtgtataaatagaaacttgtgtttgttagaggcaagaagcagaatgtatacccaaatggtattagaggcgtttctttttctgcgttgactagttgtctagatcatggtgccattgagattgtattcttgagtacagagagccctctgtgagcctagcttgcacccattttctagggctgctgctgctgaggtaggtgccatctcatctgaagggagatagattaagagacttacagctgggaattctggagagacactggctgaattgacagcaaagcttttttttttttttttttttttttttttaccttttcactactgtataaaatgagcaactagacaaccagatcccaggtcagttgtcagcagttacaataaaacaggagacatggtattctcttgaactccaacatggatgaggcaaacatcagctggaaacctagcaagaagtgtcatggaacctgtgaccctaaggtgggccaagcagagacaatcaccacaagggagaacagcatgagtctacttaacagcagaagtcaaggctacatggtcaggggaatgccagcaatggatttttggcaactttaccccccttgagtggttgagacaccaagatgagtgacctggtgagccaccatgttagtgactgtgcacatgccggtctggatgccggtctggataccatcattgctctctgtcctgaaatcagagccgctgatgcaggagggcctcaaaacactggaccttctaacatcgcctcctgaaatgtcaggactcagaaggcacaatgcacttttttttcaaggatatagaagtagttaaaaattgctgagagggcaggacccttctttgaaccagtaccctagtgacacatgtgcccgcaagtcagaataaccctgtgagataccaagtcatatagggagaatcctttccctccatggtcctctccatctgggtgactagaaatagactcttttgccccgttcagttcaaacttgagtcacacgggataggagagttgaaaggcaaattgtacagcgagagtgggagggacaatagtcaaggaattccagaaagtaactgccaattgtttttgacacaacagaaacagagagagagagagagagagagagagagagagagagaaagagagagagagagagagagctgaaaagttagtatgatttttctgagccacactacatcccaaaatatcaggaatcttaatttacataaaaatgaagtatggaagagtatcaaggtcaaattccataaagttataattataaaccagaagaaggagccaaacaacatccctagtagcaaaaaaaaaaaaaaaaaaaccttgaagggcagacattcccaatattcccacaaagtaaccatgtcaaaagcagcttgaaaatattagaaatcactaaaaatataaaggatacttctacaagattaaaaaagaaagctcttaagtgcagtaacacgacaaaagagaatcggatataaaacaaacatttctttcagaaatacccaactaacctagaaacaaacaggacagagactcccttgctaaacacaagagtataaaggagaaaagcttttaagtctctgagaaatgaaaagacaagggattaaaagagaagagatgaatcctgaagatagacaaagagaaacggaagcacctgaacaggaagagcttccaaggaagaaatacaaaggaacagaacagacaccaggaattgtagtttcagacattcctggttgaaatgatgtactgacaacttacaccctgcacttgacattgctaaccaactgcagtgttcctgtaaatacggtgggtttctagggacagtggaagactgtgcaacttataataaggaaaattaactgtcagattttctaaagtcaaaatgtcaggctagaagatggagtagcccttcaatgtatcacaaaaagattttataaccaactaaactaacttaccaatagaaagggctcaaatagtaattaatttaggcaaaaacctacaccaggtcttatgagtcctttctaaggatcataattgaaaaaaacaaaatgactaccaagaccacagctggaggcaaatgtcaaaattatatttagttataggtttcaaaccaaaacagggctaagaggtagagggcattgtctaacaatatctgctctggcaatgtcaatataactaaactattttaatatgagggaaggagagaaaaacaagcattttttaaagctttaaaaaaatttcaataaccacattggggtcagcactaatattcttcttctagaactactgtgcataaaatatgtgataacattggaacacttaactctatcacaccatgttctagacagtcaagaatgataaagaatgaagaaaacatgtgtaatgtaaaagataaaatataattggagttgtaaatttccactgagttattgacatgagttcaaaaatgcagaaagtagggaataaagtggattgtttatacaaaccataattacaaatgcatgtttctgtatctcacactcttgacttctaccaagaggtaaaaaacaatgaacaaccccattgtgtagacttgtttctttctttctttcttttttttttttttttggtgtcatttattactggaaaagtccagaagcccttgaagaactggcttgcaggacaagaattgggtaagataatcctggaacatcttacatgcccagagagcactgacgctattaagctgatgatgaatggagtcaggaaccaacttgcagaagttccctctggcaaaggggacaatatggatttcggtaatcattcagcttctctagtgaaaactgcaatttcactaaaaggatggagaactaaggctgtggatccagttgtcaattttcataaaatgcaggggacagaacactttaaacatcggcacaaatgtggtatttgtcccgttcaggcacagacaagctatacacatcatagccccagttcctcaacaggctgcagcgatttgagtgagattaaagaagggtgtacacgtggaagacagaatttaaaaatgtatcaggtgtttatttagtattgaacctggatcttcctgcctgcttcacaaacgttctactcatgaactacaactaaatatgagatttggcttttgggttttgtttttaaggacaagactaagctatggtgtttgggaatgctcagtgaacaataaacacctttcaaaagctgaatgtcattggggcactacacataatgaccaatttatgaaatcagcctagatagccagccacagatgaatggatttttaaaaagcacatatatatttaactttttattttatacttatttatatttatttttatttatatttatacatgcatgtatatatacatatatggtgtgcatatgtgtgcatgagtgttttgtgtgcacgcagaaacatattgttcatccgtaacaagaataaatttctgttatttacaagaaaatggatggaactgaaggccatcatagtaagacagaaataggaagaaaactatgccataatttctctcatatgtgaaatctgattttaaaataggtctttgtaaagttacatttaacatggaagataacatagtgtcgcttggggattttatcatcacccctttcctcctgagtgccctaccttgactagagtctcatattttgttttttattaaactgaaagaactaaagaaaaaggatataaagtatatccaggtcatggcatgtggtgctggcaggataaagagatacagactagtgctgtgttcatggataaggccaccttcactgttgattatcatctctgggaaacctattgactggaccttgtttcacacattaagagcagccaggcatgtttgcctttccaagcatctaaatggctccacttcttgagaaatatgctaggacccaaaagtcgagagtgaactttgaactatagaatcaaaccaatacagaacactaggtgggcaggcagacacaagggataaatgcctttgaatgtagacgcctcattttggaacaatcaaaacaaatctatatgcacctgcttgtgttgtgggaaagaaatcccttagaaaatgatggttttattttctttatcctatctcaaaatacatcagccattcatggatggtcccttttatctagtgtgctcagcattttcagtgatcataaagagattttaaaacatcctattgttttaaatgcatttgttctccctcaccagaggtctcaggtgcccctgttccaaaaatccattggaataataggtggtattttccagagttaaaaatgtgtaaaaaaaaagaaaaaaaagaaaaagaaaaatgttccagtttaagacaaagacaaaaatcaagctttcaaactgccagttcacagttaggataaaatagcctgccaatcactaagaaagaattcaacttcaatttataaatgccatctctcagttctctgagaaataggtggatcctaagttacaaataaataaccaaaccgaccccccgccccccgctgccccaaggagataacacgtctatgaagctgatttcacgaaactatgtaaacccctaagtgctgtctctcacatgactgctgcctgattccaaaccaggggaatgaagggcccaccccacccttaaatacagaataaaaagacagttgcatgggactgtagcaaaggcaaacccaaattcacagaggttttattaaaacaggaaaaggtcagtcctcgtccccccaaaggaacgcctagggcttgtcagaattattactccaagatagtttctttattaaattcactgtgcagaaatagaaaagacgaagccaggggagagacaggagtagaacacttccccttcctctagctagcctattcatggtcaaggctaagcccagtgcatgatctggggaacaagctcctccttgaagtatcccacaaccaagggcattttaaaacctagtgtttttaatgagctgagaaatacacagattgtttacaaaagacaggtatgttgttctccctacacccccttgccctgccccaaagaaactgtgggctggacttgttgagataccagataaaacatccctcatgacttcactgccaggcaagggtgaaagtggcctcctacccttcacctatgtgtgcttccacttgaaaccaaatatccattagtgaatgtgttggaagaagggtatagattgagggtggcccagtgtgactttgtttagtaaacatttttcaacatgggcagtcacggagaaatctcaaaccaaagtgaagtgcaaacttaaaatgggttccggagacaccctggcacatgaattaactgtgtttggattaatatttagaatgtcatgcaagatgctgcagccggctttgcgtgacactccggctgttcttcatagcatttttatcatgaaaatggccatattttaaaggctatggcacactcactgtgtgagagactttacaagtgcgagagagatgaaaagtggaaaattcctcccccaaactccaggctctgcctattaaacagacaagctttccaattgcagtctacattttggtatcaagaacagggcactgcatttgctttctgtgcggtgcagggcttggccaatcccacctctttacacttcatatggccctgctgtgagacaagtctgggctgggggcatggctcagtggcaagagtgcatgccttgaaagctaaaagccctgagtttgatccctagaacctatgttgaaagaaaccaggtggagcacgtccacttgcaatcctagtgctggggaggcagacagtggacgatcctttggggttcactgtccagctagcctagcccacctggcaagttccaggccagtgagaaactgtctcaaaaaccaagatggatggcacctgaggaaggatacctgaggttgtcacatctgtatacacacactaacacacacatacacaaacgtgtatgcaggtaccatgtacataggtgtacagacacccagaggtgtacacaggtacgtacacatggatacatgggtactacatacacatacatatacataggtacacagacacccagaggtgtacacacacacaggtgtgtacacagggatgcacacctgaacccatatgtgcacaggtgtacacacactcagcaggatcagctgtcccaaaaccatgcccataagaaagcacaggggtgcacacagacaggaaacactcctcacaagagtgcaaccatacaggaaagcagcacttagtggtgtcacttctcaggagctgaaactgaagaccagcgtcagaaaccaagtcctctcgggaaagcctttgtaaccagcactgccaacaggaacagggctggtttagatctgccggacctgggtaaagacaaatccctcccttcggtgtagcttcaagtgtttcttaacatcaaacacttttatggcttaggaatgaaaacatcgcctagtttgggttgtatttctttcccttgcaggtttctggtggaggtgtcaataaatctaatacagccagaaagaacaggaagaacaataaaaataaggataaagttcacgccacttcatcaacctgtaatcagaagggagcaatggtgggcacccatgaaactaccctacttccccttctgctgagatccatctgcccggcagtcccgggagaaagtgttaggaataaagtgttaggaaccttggcggattccatggtgggcgagggtgcctgggggcgaggggggcacaaacacaccagcagacagagcctagtgagaagttttattagaaagggaaagggggggagagaaaagaagtaaagacacacagagactcagagacagagagaggacagaagagaaaagggagaggagataggaaaagtcctgtctgtcccagggcaacagcaggaaagacagcagaaagagctggaaagagagatgggaaaagagcctaggtctttcttttattaaaggggtcctttgcacctgctgaccagggtactgcctgagtgcattctgccaggtgacaggggcaggccagcataatgcctgaatccttacagaaagaatatctggtctggggctttgggggtttgggatactgttaccccctcctctcctcttccctctttaatgggttctagaaaaagcgtaggagattgctgtttcagcagacagggagaagagggtgggtatgctgtatggagttatttttatatttaatccaagagaggactatgcaacccagatgactctgaaaagcattttaggaagttggcaagggagcaagccacctcctgctatctcctgctgtgaagtaaccggatccacggtatagatatgttcttcaaagatatcaatagcacagataattaagttagcgcagcgaaccagctacatgctttgaagtgtgcctacagttggtgtactagcctttccctcgcctggtaggctaagcctacaatctcctcacacatgttaacaatcctgcgacctttagtccgtcatcattatcacatcatttgcccaaccacgtggggcccaccataaaaacactgctgagaaacaaggacagcaattaacagagtcagactcaggctcaggctccagtgaggtcagaagaaccttctagaagaagagctaagagtctgtagactcagctccactgctgcagaaaaagagtgccatgggggatgaaagggtgtcctctgttgtgggatatttgtacaccatgtggaaatgtattgctgtgattgttgtaacaaaaaaaaacaaccaatagctagaaagaagttgagctggacttccggggacagagaggactctgggaagaagaagggtggagtttccagatgcagaggaagcatcatgcagtactgagagaggaggtaacaagccacgtgacagaatatagattaaaataaatgggttcatttaagttgtaagacctagttcagaacaagcctaagctataggcctagctttcataattaataagtctccagatcattatttgcaggctggcagtccaaagatagtccaacatgacagcttgctacagtccccaaacttaggagtgcataaaacctcaagctattggagctgtttccaaagcagtgagttactggtctggacccattatttactttctctgcattttgcacttttgtgtgttgtggatgctcatgtatgtaggggtgcatgtccccatgaacctgtatgtggaggccagaggccataattggtcatcttcctctattttctgcgtgagggtctcttgctttgggctggaatgactaaccagcaatccattgggatctactggtctcagcctgtccccagactgaggtcacagatgtgcattgccatgcctggggacccaaactcaggccttcatgcttgttcagcaagcactttacctgctgagaccctccatatgtcctgcatgttaacaaatcccaaggaaaacccaagattgtagtcctcaggcagtgttttatggaaaaagaatgtgtaagtcaagtttcacagaactccaatagtgtgtgcatgcgaccccagaagcaacctctataccttctctcttctttgtgtattttatatcattcactcttcaaaacatagattatagatggctataggaactgaggctgaacaatgtaaagccacttcattcaagggggtcagcctttactaacagagagccttccagggaataaacaaaggatggttatccatgtaactcctggatctgggattttctatcaaactcttgggcctaccacacttatgccagactcagcacatatactgtggcaagcctgacagcatcaattctgtacacacacacacacacacacacacacacacacacacacacacacacagagagagagagagagagagagagagagagagagagagagagagagagagagagagagagagagagagagagagaggattgatgcacatgtctatgttaaccagaagacatccttggtttttgaaagatgatgtctccttactggagctcacagtcagctaggtgggctagctgattcttagggatcctcccttcttcatctccctaggactgagattacaagtgcagcctgccatgctgggcttttccatgtaggtcctgtcaattgaagctggatcctcatgcttacaaggccaacacttcaccaaatgagccacctccacagcccttcatcctgtcatgaaaacaggtatgggaactccatttccctatctcaggtcctgggtctggggactcactgatctccaagcagaggtccttttatatgaagaaaaagtagaggtgtctgaacagctcctagggagatcaatcatccaggggatccattagtgccccataaattccactgctcagaatgctgatatatttccagtgatttgtgatgttgtcctttctggggtttgatggcaacttcagtttaatacaaaaaggcccatttggcaaaggtaaaatatctagccatgacgagcctaattctctatattcccaactccctggtatgtgtgaagcagacctcctcagaagcttccagccaaaatccccacagggaatatgacttcccatgtggcatttccaggaggaaatcccattgttaaaggtatactcaaagaaaatcccacgaggcctcgttagagaaattttatttttatttcaaacttaagtgggcttgaactccccccccccatggtgatattttaagaggaagcctccatccccatgctgcaaactcagaaagcaagtcagagcacagctagcttgaaggggacagtcacagatgggaagggacacctcaagttcaaaaggctaggctgcaaaggatacttgccctgtgtcatttacacactgtctaaaaactcagtcagcaatgatcatagaagaagagaaggcagccaggtgtgggtttctgtgcagatctggaccatgctgtggtccagaagccttctccatcctctctctagaaccaaacataggcctactttatgacaggaacccttatgtcccagagaaacattccttcaataacagctccatagaataaaagcttgagtaaccaggagcatttaggaaaacataccctccctatttccagatactctgccttcactgccctgttccttaaggcttcctgccaggagctcattatagtaccgcaggctccaggattggagggtacagccattgtacctccactgtgaagttgctctgaggcttagatgaattgacacaaatgcagagactttgaacagtgtctgctacattcagtaagttctctggaatctgaagccatatgaagtgtgactattgtggtaggtggctctgttagccatgagacagacacactgcgattttaacctttgcagagcaagcttgtggcttgtttgcactttatagaagtttctgtgtctcgtctatggcctatggggagaagtcataattacaaagcaagcctcttgcaaatctgcagttattctagctacctacttcctcttggcgtttgtagtctgcatgtgtctaaaccagggccttttggccttgacactgtcaatacttgaagattgataactaactcatcagtgtgcctgttgttggggggtgctgcctattcattacatggtgttctcagcatccctggggctccactcacgagacagcaacaaaaccttctatccaaccataataatccaaattgtcaagatattgtcaaatgtcccttgagggaaaattatcagaactattggtcaaaattcattttggaacaagcaagtaaggtctctaaatcatgcctcaggcataacacagtcaccctgcaacaaatttgacttacaccacaaatagcattttactagcggtaagtgaaacccgcagcctggcagggtcaatgagatgtttagctctaacaagctatggtgagcaaaatagtccaaacttctccatatatgcaaactcaacatttaattttctgcaagattacccacaataattacaaagtttccataatacagcctcaaagacttggaactctgagatacataagaattgatcttctatctgttatctttgccatgtactgtgtccatgtaacaaataaaataattgtacacaatattctcctccaatttttaggagtattaaagtgaaactttcctaaaattaaattatttagcaatctggtgaagagaaatacacaacaaacccatagcataaaagcaaccctgtggttaccaaacactcactttgcccataactatgtatcctttaagcacatatttttgccttgtacatcctaaatcatagtttgacatccaaagatgttaacatattttgtgtagctgctactggctaatgatggcttgaaggtaacagttgatattcacatgacaccagtttgctccatctgccagtaacacacagagcttttgaagcattccgatagctagagtggactttctaccgggaatccatagtcaaatgctgactatggtagatcagcttgaagatttcagagccattatcaaaagacagaatttctttgtcatggtcttagcattaagctgggtcaagaaatccatcctaaaatacacacagctgtatcagggtgtcatttacttgatagtcattgaagctcacaggagcaaaagcacacattcatttcacctcctgatagctacatgactaataaagctatattccaaatcaaaacaaataataaacagatacccacattacaactgagcatgggaccatcagtcagcaaattattttttttaattaaaggtattggactaagcacattgcatcatctaacacttccttggtcgttctctttaagatgacataatggcagggccactctattgcatgggacagtaggtgggctcagagctagataacacaggacttaaactgataagcgcaaagtcatttctctcttgctttgaatggcctgagtccatatgagaatagattaagtctctgctctactatgtgacctcatagatactgggtaatgatagacatagaaccatactgggaactcacagaagaggagataggcatcatgggaaatccttcacagggcactgacccttccctgcctccttctcctgccctcctctcctccgaccccacagtgacttttctttcaagatttattttattatcagttttgtgtatatatgtatgtgcatgtgtgggtttgtgcatgtgagcacaggtgcctgaggaagtcaaacgaaggtgtcagattccatggaactggagttacagaccattgtgacccccgatgtggatactgggaacagaactccagtctaagcagcaagtgctcttgaactactgatccatctccccagcctctgactttgcttttcagtggaggataaattgtaaattggtgccaccttgcagccttggctaccacactcaggacacaaagcccttgcaagagtttttcttcccactttctctggggcctttccccccttctcagtcttctttatactgaatcaccagtcttaactttttatcaagcctctgccaagttgaagactctgtaaaataggatcaacctggatctagacacttagaagacccagtttctagtattgttattttttaactatcttattctgaacaagccacttcatcatgtaatgctaacaactcagctgtaaaaaggaaaatgataatttgtgacttcaaaacattcacaacacaaataccatgtattattagaagaaatgtttatatttagaagaacagagagtaattttgcatattattttacttgaagccataagaaggcaattattcaatcaacaagcatgtactcagactgtttcacacaaggacagtcatatggttctgtgaccttgaaaaggggaaggccaacaatcgtggcttccccctttgttccttctctccacctccagcatgtaaaaacactgaaaattggggctggggaagtccttgattttcctcaagtgagcctccaactgtggcctcaattctataacattccaactgtcttaagtagtctgaccttgacagtgaccttgggaataatgaggatttctcagctccctctttccagtctaccttggatcacatttcatttccaacaaatcacaaagaaaagtttggcatgttgttgtttttggccccctgaacttactgcatcttacatcttccaaatgagcatgcagagcagggagtaccgcttgcaaggaaaccccatctgctccacagacagaatgccagtcccacatcacgagagccacgggtggccatctggggacagtgccatagcacccggtaggccccaggaggctaaggcacaagatggcacagtactctgcccagcacccagcctttgttctagaaaacagtagccctccattactcttcaaagatatggtgatggccttgccagcttgaagcaccagcaaacctgtatacaagagctacattctacttcagcaagaccctctctgggtgtgaagacctgggtgtgcacgaccatcccctctcatgtgtcttccagtttttaaaaggcaatgtcatcacaatcacactacttgaagaggcttcctctggggtgtcagaatctagagaacagctttcttgcctgtatgtgaggctgagtggctcagtttcctcatctgtggtattgggaaggagatgtggcttgtttagctcagaagatcttttaagattaattcaaatgggaggagtattttaagtgaaaaggatcgggccacgctgaatgcatagttttctctatggctattggtataatcggtgcccaagtttcaagagtaaaaccagattttaggctctcatcatgcccagcccccagggttagtaagtgaaggagtgtggaaatggttgcatttttttctttatgctaatgtactggctctttttcctctttttgtgtctatcattacttttgcatgaaactcttacaagatagaagatcattccagactggaagggtaagttgtcaggatgtgagatctcaaagccatcatttcctagtcgttctgcttttgactaaataatgttttaacattattaacattatgcgttaaaatgagaatgaccttgactacctattttcccctactgaaagggctgcctaaactgcctaaatattaaatgagtctctctctctctctctctctctctctctctctctctctctctctctctctcttattctccctttcctctctactcctctcctctctttgtccttccctgacatttcctcttatttctcatttttcattctagaaaatcaacttctctatatttctgaagaaaaaatgttctataaactgtctccagttgaaaggcagagcacatacacacatggggaggacaatcgactttcaacccagccctgtcgttcattcgctgtagatgtgagcaagttccaaaggttcgtcaaggctccctgttctcatttgtaagatggagctgaaaatatctatcaaataagaataactagataccacatgtggcacagtgtctatttaaatggcacaataaagaagagccattatctacattcaatctaaaagacagcttctatattaataacatttcggacaatctgaagaatggaaagttgggaggagaatcacaagataagacactgttccatcaaacagtgtttaaaacaaaacgaacagcaacaaaagagtcacctaattgttactactactcactgagcacttaatgtgaggctgacacttttcttagactctacacccattaacttagttctcactacagtcctacaaagtagctgccattatgactccaatccagggtaagtggcccagttgatcatctacctcatcccagaaccttaatatggaatcagttccagagctatgctggaaagtattccctaagaccatgaagattacgtaagatggcaccttcaagaccaattatcagcaataaagtaccggagtctacttattacgcccttcctagttaaatgactccagccactctcattcaccaacattctaatttcttcccttgtataaagaagaaaccagggcatccaagctaaggctttaagatcttcttagggccctggacatcacccatcaatatcaggatttttgccatcatcaccatcaccatcactaccatggatgactctgtgttgggcaaccagcaattcttccaacgttttctatatgtgctacaaacaaggaaatgttgaaagctcccattctagatacatacttacaatcttttgtttatatttctaccacacactcaactccaccatcaatctcaaaaggggaatgattgacaattaaaatttgctgctacctttcacagcaggtaaaggattaagcatttactataggtaattgagtttaatcctcagaccaaacctatgatgaatgcattacagatacttctagttcagtccctcagcaaagaaggcctcagccctgattgcttaactgtctttctcaaggtcacaggggtgtttagagcacagctttacaatttgacctagattcccataattctttcttgtagtcactttgaggcggctcacgcttttctagactgggtggtttttaattccatgtacaagcgctctccagctgtagactgggtggttttaattccatgtacaagcgctctccagctgtagactgggtggtttttaattccatgtacaagcgctctccagctgtagactgggtggtttttaattccatgtacaagcgctctccagctgtagactgggtggtttttaattccatgtacaagcgctctccagctgtagactgggtggtttttaattccatgtacaagcgctctccagctgtagtctgtgacactgtaaggcaggcctctcagaaatgtgccaacaggaaggagagagacctctgaaccatcctgacttcactctcacaggtttgaggaccttgaacaggctgtatattgaagcccttccagctcctgccttgtatgttttgtgatttctggaaaatggatactaccatcctcaattctaaccagaaaagatcctagaaagggttcattgtgctggcttcacttggtggccagaccatgaggcaagggcagagaggctggctgggaagtgtgagaaagacttccacctcacagctgttcctgtctgaatggtgccatgggtaaacaagagctcctctctagagatctctgttggcaacctgttttcattcctttctttggggggttaaaaagagagagaaattcatattttcatggagaatatattgctttctacatgaaactgccaaaaacccaactgtagacaaaatccatctgacaaaaatcccttaactgctttgattctgttcttaaaggagattagtggttggaaggtcacacggaagccatcccactgcacactgcagtgtggggtttcaaagccttcactactgaagggatctcagtgcttgatgccccctctctccatggtgtttaatcaatgaatcaacaaatagttcctgagcaaggcttccctggggtctgcaggtcacttcagatgtgactctctagttcaatagtaggagaaaagaaaaacagattttttttgtgactcctctaaaagtttccatttataaaaccagagctggcatcaaaaggctgcgggactcctgtccctctttttccaagctctgtgattcatacagaaagaggcaatgccatggagcagagagaacacagaatgaagaaaggggaaggctaggaaatggaaggataaaaatcctggaaggggtgaggcaagaggactgaaggaacatgacctttatgccacaaggacaaaggtcaaaagagagataaacagcatttcaagaaatgtttccttggaggtgtaaacgctctgccaacagacctgctgctactggtttttaatacaaataacaaccttggtgaccaactaaggagcactgagttttaaactggtaggatgagggtatacctctttctaaattttgtcatacttaccatgattgtatatatgtaccctggagtctagcaacagtgtcacacatgtaattaaatgtctttgctttaaatgtccttttgccctcatctctagcagtgggatttatacagtctcagcacccacagtatgagaagtcttgatctgcaataagaaaaatttaaaactcaaatagtcttcctaaagaattttgcatgaaaatgacaaacatgtaagataccatctcaggctttgaataaaatgttgtgcaaaatacgccatgatccaatatcctgacttgtcatctcccaaatgaggatgcatgatggcagagacaggttaatacataaatactgtccttccctgtccagcacacatcaggcatctacttaactctgcattttttcaaccaaaataaacaaactagcaatagtttattgagcacatactgtgtcagatagggtgctgaaaattttctaggcattatccctccccaccctctcaactgtgcctggcatgccctccctctattaatgaggatacaaaggtcagagagatgaagttggcctacacagaggcttaaggttcttcatcggcaagcaaagactccaacacacatctacacagactgtgccttcttctaagtacccgtgtggatggcatttttggttgtgtccttcggcttaggtagtaaaggtgagaaaacattaggaactgtgtttttaattataattaaccccaaacctccctctaatatcatagtctcaacatctgcctgaaaatcccctcccccaacgcacattagttccccgagtctcaccacctctaataggcacagctggttttaaagtcccaagcaaaccctgagcccacatcctcacccaggacttcccaaagagtgtgtcggcctgagggtgactgaggcactccagcatattaaaaaacactcgtttaaaatcaccaccacttcggaaatctaagaaccaagctagcgtgtagtgcttccgggtctgcagagtctgtgaggtaaaaatcttgagaggagatggagaagctgatgcttctggctgtccttgagctcccagctccaggcttccatgggttgactgggtctacctcagtgatactaataggaaaatatacactgaagtctatacagctcagcatgacctcaaggggtgtccaattatgtagccagtcagaggaatccatatatcaaaggaagcaaaatgtaagcacatcattatcccttgttcccaggctaagtgaccatatgccaggagtggggggatcggcacgggagcaaagccacccattgagctctcttgaagacaaacatgcctagctgagtccttagcttaaagtgtccacgggagcttgagacggagagcatcctcaaccctccacactgtggatgacaaggtccacctccaaacctaagcaagggcatagccgagcttcacagatgccctcagccccacaaagttagggaccagatttctctgcttgtctctaattacaagctagacacagttcaccaaactaagcctgagttagtacctaacacagatgggcacaagtttgttccagttttttgttgtttgtttttagtggaaatcaactttatgaagaccaccatttccacatacactcaccatcccttccagggaaatgcaaatgtcattatgtggcctggccctttgagtccagaaaaggtctggagtcattaaaaaacaaacaaacaatgaaacaaagacctgaggttagacccaggactcccctccccccaaggccccatgtgctggttactatcctgcaaaagtcgatttgaaagaaagtaacattctttttcatgaagaccaacgttacagattaatccagagaaagaggaagaagcaaaaagacagatgtgtcatgtaaaagggaaagaatggagggacctgtgaccctgttacatctggtctaggggactttcagtgagcagcaagtccgaccttccataaagaaaaccccaaaatactcagcccgctgttttgtttgctttgttgctaaaataaaggtacttaccactgaaaatccacaagtcacactttgcccacaacacacaggccacctctctctttggaagcccacagtggggcctgtcaagttcaaggagacacagactctagtgggttagaactaggcaagggaggaggggggagagaaaaagacagactttccctttaaaactgaagagaagcagataccagatcacatgaccttttaccgtaatttctattaaaatcatttcatgtctggttgcccctgctctcccggctcatttgtattgtttacaacaagccactgcacagccggttagtggcggctgactccatggttacccgtttttacattcactagttaaatggaatgcattttgggctgtgggttccagggagcaggctcttaagcaaccacaatccagccatcaatcaggctaatctgagagaaattaatcttataaacataagtattgttgcagattaaaaattgatagaaagggggccaccagcttccacagactgagttccaaaagtggacaggctcggcctcacctcagagcccaggtgtttagtctgaggtcttcctctgacaaccagtcaggctagggggcctgaaaagctttcaagggtaatacgaccactcctgacaaacaaacacaccaccacctcccccagagccctgagcattcccttcacctggtagcccttagaatggaaacccgggcttagccagactgcaatcccagcaaagtaaattaaacagatgcatacaggaccgtcaaacagcagacaaacactgagtagggttcaattaaaaccaaacctcagaggaacacgctatgaacaaattataactgcagagtagtacagtttatggagagccagcacactacaaactcattccactgtccatgaatttagggagttaattctttaaaagcattcccccaaagctaacttgtttctcgagatggacaagacccacaattatcggccctaataaaaattgagaagttgtatagtttaatgcccacaacaattggcccacgagtcacatgcatgtgtaaagagaagggcaaatagctaaagctaagatattacaaccccgtctactgcaaagtcactgtatcagaggctccaattgatctgttgcctcagtgcgaattgaaactgaatgtaacataaggtcggaaaaatccctcctgtactgctaatcggatattgtataatggttgattgcagctttgccttgtcctattgctgcctaaatcatacatacttacacgttctgggctcttccaagagtttggtgcagtttcaaggacaaatgtcttaagcaagcctctactgtgcagcagggagcctgctcggatctgatgacaggagcctggtgctaaatctgacaaccgagaaggaaacttcctgtgtggagagggtatctgggagaggctcgggttcaaaaggcggctgggaaggtgctgctcaggctgctcccgggctgtgtggacgtggtagcagctgagctgtgtttgcagccctgcagaaaggaacctttactgaaaaccaatggtatcacgtttcagaggagcccgtgccaagagctggagagcagagcaacctttgacaacttcacacaattcaccccagcagactccagcacaggtcagggaggggtgtgggaagagtctccccaccaccagggctcatgtccttgtctcagcccagcacccagctaaccaaaggctagcaccagctagcacaaggcactccctgcattgaacttaaacacaccttctctcttggctgccttcacccaccatgtcctataggctaagggagaccagttaatccagtttgtactctgtgtgtgtgtgtgtgtgtgtgtgtgtgtgtgtgtgtgtgtgtgtgtgtgtgtgtgtgttcatgtatgcttcacagtatgtgtaggtgtttgtatgggtgtgtgcatgtatatgcctgggcgaacatgtacattgtagaggccagagagagacatcctgtatgagacaaggtcttccaatgaacttggagctcactaattggctagagtagctggccacaagagcctcaggaatcctcctgtttgcctgcctagctgggagactgcaaccacttggtaccactctggctttgtgcaagtgtgctgggaattggaacccaagtcctgaggctcgcacagtaggcagtttactactggccaagctgccttcccagatccttaatccaaatattaaagtgcttccctctgttttgttttactttgtttttttttttcacccattttgtgatgttcctgagagacacactgagaagagaatagcacagatctagtcctttcctactgaaatctaggcagtgacaactgacgggggcatctcaaaacaaccatgttgtcaagacaaactgcaagtgactccaagtgagctcagcatcctaagagacagcggggcaccacgaacagatgaataagaaagaatatgggcgtcacccaccccctccagtaggggaactaccttgtcaattatcagtcttacatagaagagaggaagcattgagacttcactatcgccacactaccttgccctctctcctgcccctgagatgagaatgcacacaggcccacaggaaagcatttttcaacattgcccatcttactttacagcgcctcttcacggggggccataggaaatatggcaagaaggctggcccaggagctgcctgggaaaacagtaaaccatgtgaggactactttttgcacaccgaccacacactgcattctatggacagtcacaacacactcacgtgtgaaagccaccccacaccatgaacggagtcagccgggatgtctggtttaatgtctatcctgcctctacccttccccccacacaagatccacagttgctcagaatatccatatttctgttttcctcgttacgaatggatgcagtctcgccgccattgaagacctttgtgaggatttaaaggctaacatatgttggggatggtcttcaaagcctgccactgacagattcacaagcatttactgagtctctgttagcagtcaggcatggtgccagatgctgtgggcacaaagtcaatcacaacacaggaccttccctccaagcccaagtgcccaagagttaagtcttccatcctccttcccatactctctccagcccctactgaacacacaagagcatttccaaatctcctggctccaagctggggagtcagctccctggtagagcagtggcctggcaaatgtccttctccagtgcaaacacaacaaaacaaacaaacaaacatacaaacaatcccttcctctcatttgaccctcccaacaattttacgagctagatgaaactatggccaattcataaataagaaaaatggcattttcaataggacacggctagtaaattgaagcctggatgccaatgatgccctctggtgagcccaagcactcctgaaggaacctgtacgagttggtcatattttgtacaatacttcctcaagctgtacctgggtcttgtttttgtttgtttacagtgctagggttggggcgggggccctgtacccctggctccgttaccttaacaatcattatacttccctaaaagcagtatggatgccttgaagcagaaactgtctgataaaattctactgcattttgctaactgacctatcattatgggaaaggtacagcgtgttcagtacatttctctaaactgaaaagaaatctgagctgggctgactgtattaactgaccaatttcagagacagctttcaatacaagatggtgttgaggtcatgtgcaactcaaaaataatcggatgtctaagttcatggcaccaactcataattaagttccctgggattttgtttgcctcttgtttagcacctatggacggaggatctcatggtgttgacaaaagtgaacagaaattggctttcaagcacaaattggatctcatggcatctttgaattttagtttgactgagtttctaggtttaacagatcacagagtgtagaattctgcccatcattatctggggagtcagctaaggatgccccagtttcaaataaacccaaatatatttctctcattctgtgtttttaaatgcattgtctgtacaaacagcctatttcttgagcagtttttgacctattctttcaccgcatgttttggaatgtagttcatttataatggcaaaattggctaggcttttatcagtgaatcattcataaaaatatccctcaaagagacatataccacacctccaccagagtcaactggtatcttccattcattacttctaatcttatacccatgaagacattttttttccagatgcaatttaaagcactacttgcaagtatttatcaccaaacaaccattcctgtagccttcacaaaaatacatacattttagattactatcaatgctacagaaaaagtacaaatgataggcggtgtttgagacaaacaaaacaattgccaaaaacattggctttgtttccaaagttatttacttgtttatttggacaagaagtggcccccggggaagtaaagtaaataaagctgctgatgtcttggctctgtctgtctgaaaatcaccatgcctatgaactgccagccactttcagctgcccacatctgtgttacttcctgcttccttcctctctgccttgctccacaggaaagtagaaagtaccaacaaaagaggcttgggagtgagattaactgacttccaaaaatcaggtccaaatggccagacctaatcattggagatgaggttagcccaacaattctcattcagccctcactgccatcttgagaatcaatgctttgattagttacattttcacaaatgataaaggttcagggaactaataatttcccaaaattgcacaagttggtgggtggcccggcagaaattctaaaatgagaattggagacctaattccagagtctcttccacggtatccacagagttgtcccctctggtgacaatggggagtgattaccgccattcgtttcccttgttcttctgtagattttgtttgtgtattttagttttactttagacagggtgtcactctatagccttggtacttaaggcaaaccttcagctctaaccacccaagtgttgtgattttaggcatgagccacccttcacctggcttcacatcgcacaactcagtgaaactaggccaggcaattttcacacacacacacacacacacacacacacacacacacacagagagagagagagagagagagagagagagagagagagagagagagatcctcttctacctgcaattacctttcaccttttcttctcttatatcttggcctatgacttcactgagtaaattaatctttctccatttgccctactcatacatttaatgaatttcagtgacaaaaaaaaaaacaacaatcttacagcaggccatatatacttagcaatagtacagtactgtttcactatttcaggggaaagtgaagcctcctattttgctgtcagtctctaaaattcctggacgtttctcaaaaccccttttatatattctgcaagatttcccatctacccatttaacttctagatttgtgtgcaatgtctgaaacctcagacctcaagtgtccatacattaaagatcattgctcaactccgctatctgccatgtgcatcacttgtaccaaaacagaacaactattttcacattaggatgtcactgataaaacaatatttcattcaaacaggtcacaccagttattatgatcttgcctaggaaattagcatataagacttttttgcagaaaaaaaaaaggttctgtttaggacaacccatattcagcatataaagaaaacatctgcattcaaatctgaagtctaagtctggtgaggtgtttattccaagccaatgaactcgagctctttacatactctgcacactgtcatgtatagccttagcatatggccacacataaagaaatggcttctagaacaagttaatacagagcatttgttggctggcttgtaaactggagccttctactctactccctttggttgagccagagaccaaaaggtctgccattgttctctgatgaactggtagcagatcccacagataactgcttcctgtcactgctgctgacctttcgtggcaaccagcatcctgccctctctacatcatctgtaaaaagcaagtttccgactctgatggtgattggcccaaaggcccatcagaactgtgtcctaattctgcaaccttcagaaaacaaacgtccacactaaactgaagatgaactcctcacagctgaaaggagtgctcatttacacagacgactttggatttctctctctacacaataacttggaaaaatatataggctgtgtttacagtggcacgagagccgcagtctctaagaagggctataacttgctaacagtcttcctgatttatgtcgggaaacatacagggcatgaaatgatttctgcaacctaacattttcctcaagaacgctgctgatcaggagatatactccccagctgtggggactgcttgttcctgccccctttccaagacacatagatacaggttgcgaaattctacatgctctgtccctgaaaaggggttttatgttaggaagtgggaaaggaaggagaaaacaatggagaggtaaaaagaaaaagaaagaaaagaacgaaggaagaaaggaggcaaagaggagagtaaagaatcttatttccatataacctttaccttgtaaaaagtgaatgccttcttaagataggcaataaataatcttcctaagtgtgggctatgaggatgtatagttataaactatcactcactagacaaatgttagttatttttcttgttagtatttaacagatatggaaatttgcttcacagtctgcaattgtgctaacaaaataggtatttgtgaatataaattactatggtcataatatcagccttataaattgaatgtatttaataatgagatcaaatttaaatgggaaacatatattttgaaacacacagcttacataacctcttaaatatctatgaaactggagatataaacatataatgtatggtattttgagtctgtagtgaaacaatcatagatagttagaaatgtatattttctagggaaataaaacaacttgtaacttacactctatactatagaggaataaaacaagtaaatcagcatttagcatccttttcagagtttgatcaaggttatttacctgagcagacatgaaaaaaaaaaaaaaaagcaactctgagttgaatctccagtgtcctggaaatttcaaagtctccatctctccattggtttgtggtaattattatcattgcatagtttaatggacaaagtgtccttcatcagaggagtatgaggagagacaacccaacacttgtgtgacgtttcggccctgctcaatagccacaggtgtcagtctggaaggttgtagatacatttgtgtgtgtgcagtacccatgtctgagggagactagaaggctgggttatatccagtacagttggggaggtcatttaaggaggagggtttgcaaccaggctagagtactgaagggcatgttacctccaagaaaaagaaaactccctgatctaagtgataaacacctagagagctgtagcctcatcccagaaacttttatcaggaacgaaaactcatctggaatgttcattcgaagacttttttaaagagattcttttcctaatacagtgaaggtgagggatcaaaaccattagatgtgtgttgataacctatttcaaaagtctgggggagattttataattctcccttcagagaagaccctttgggttccttagccttggaccactgattccaagcaccatacaatgatgaactggaaacaaaaataaatgaaagctatttgtggaaatatccttgggctggtgaagtagcagagttcttgcttggtgtacaggattccctgggtttctgctccagtaccaccaaaaaacaagaggcagtggtggtggtcgggggtgggggggcacttgctgaagactcctacagtactctacccctaactttggcctcaaagcttgtgaacacctggctgattccttgctctgattctgaagacccagttactctactggaatggcaatggtaatctaaaactgagttgtaaagccctgctacatcacaactgtaaccaattgacaacactgtcctaagagacaatgtctcttttgcacaaaaagccccagtgtgatattttttttactttaggaagataattttaaatgacttaaaaaaaaaagaatcacaatattgtgatacttagtaatcattacttcgaaatgacagatgctattgttcctggagaaatttcagttgcttttctcctaccagtgctttagattgaaagatttgccaagtgccccctggagaaaactgaagatctgcatttaaatagagatatagtccttcggaatgcacagtacctgagaggcagatacagtcagggtaactcagattgtattaggcatatttcggtgctgtagctatcttgtttcatggccccttccctctgtacattcttcctaatatttgttaaaccttgttccaaagcaaagcccccacactaacaacaagctattacgaccgtacatatcattcctgatgtgtacaaaaaagaccacagaagatacttggccagaaatactaaataattgaagagtataatgacttaatagagtagtaagcttggtttacactgcagccaatttaagccataaaaatactgtgtaaaaattttatcttgtggttgaccattacatagtcaatctattattcaaaagtgcctacctcttcagtgtttctcttcgtcaatgtggctttccctcaaaagctttctatcccgacaatcttccaacaatttccaagtaaacacctatcttctgcgttgtttcataaaatcctttcaccaggatcacctgaccttccaggtctcactgaaacaggtcagcctgcaaaggcaaactctgacctccttgaatatgagttggtttgcaatgaacagagctgagcacacgaggcatggaagcaaataagtaagtaaacaaacgaagctacttgcttgccacctctgtaaacaaaaggagaatcttctaaataattccctttccatggcaggtgaacccagggatttgtcccttagaaagtgtcaagaaacagcagaaacgtttgctttgagtgttggactaaggtacatagtatcgaagcaggagaaacaaccatggagaaagaacagttcccagcatgagtccgtgacccctggcaggttcttgccaacattttcactacatctgagaacaaagtccctggaaaggaagttattcagatactgttttcccatacatgctcctgagagctttttggtggtctgtgtgcttagttagttagcccttatcttgctgggctgccatgctcatgctgagtcaaatttggagctcaaaatgaaagatgaaagatcttgaagatcacttaatattgaaatactgttgtggtaataagtggtgctcagttggagacagaacatggcactctctggtaaccttttaatttctggaaaaattgcacagaataaattgagctgcacacacacatgaaaacctaatcaattgatctagtctattctgttgagcaaagaataccagaaggttttagtccatgtcatacaagaagacttaaatgcttttgatttactagggggaaggagccatcctttacctcatcgccacagtcaatgaacagcttaatgtgcgttgcaacaccattcacaacagatacacatttaataccacctaatgcaagtttagagagttatgagaattgctttaggacaaagtaacaaaagcacagatagcagacaaatcagtgtttgaaagatgctggaggcctgcttctttgcagcctgactacttcctcaaaacaaggaagcatccccttcaaggtcatggcacctgcatcagccagtccatgcctctgccatccctgagttcagatatgagaggccttcaaacttccctctctttgtcacaaagacagaactgtttctcaggttggttaactcagtttgataacaccaaatctactggacaggagaaaaacaaaacaacaaaaagtaccaaagccaaagacagactgaagccactctacggtccttcccagctagtttccctcagatacttctgattttttattattttttttcctgaacttggttgtttctgaacttgggtgttttctaaacaccctgccatagttggtctttgggcagtgtgggaaacagatgggtttcccttccaaactagtccagcccttcagctgctctgaatacttcaggggctgtggctcttcatgtcttcggttactggttactgggcagggttgttttaaagtagcaggaggtcacaggcccatttggcaactcggaatcagcagaaacaaagcaacaggattaataaacacatacagttatccttcagcgctgaggcttgctaggggctggggggggcagtggggggttctcaaggctggtccagaactgcttgttactgttctggaaggaggaggaactgcatctaggagaagattccctgctcaaagggaggaggagagaggggagcccttgggtccccttttgcccaaagaggggtggggaggggtggctctaacctggtacactgggctctaacctgctggtgctctgataggatcaaaaggtggcaaggaatgataagcagtctgaaatacttagtccagtgacctccagacaacttcggtgacttcctccctggggaaggtgaaagcattggaaagccaggagaggaggggaaggcttagaggacaggagggacacatctcaacacagcagcagccctacccggtggcaacacccttcaactcctgacatccctttcacccacagcgaccctgccccatgtccctttgggcctatcccctcccagtgcccgtgccctaactctgccttcggtctttaccactttaccaagccctggaagtctgtaaccaggaaggggggatgggaggggtgttgaaagaaggaatctaacagcaattcaaatttatccgtgtctccagcacacacctgacagttttgcagtctgggccaggcaagtctacaagaggtgggcacttacttaagcgtgtgttattgagagagggtgtcctttattttttttcttttctttcttttcttttctttttttttcctccaagagactctaagcaagtgaagggggaaggggtagcaatacggattccaagccggactgcaaacacagatgcaaatgtctgtccccagacgctgatggttaaggatggggcagttagttacctttggcagggtcagaactgcagcaggttaatcgggtgagtcctcagggattttttttttttaatttttttttcaaagcagccgtagcagccccggttgctttggcttaggaaagtctacaaaccccccatgcagggacatcgcacatctcacacacgcctccttgagctgggctcccgcgacctcggcggggcgagggggtggcgggcggccggcgggcggccagggcccggccccaggctgtgtccccgcgcgcagcggccctgcgtgggccccggggtccgcgtcccgagcggcgcagcactcacccagccgggcggcgaggggccgagctgcgcccgcggctagccggagcgcccaggcgcctcccttcgctcttggtagcgtcggtccgcactcgctgtgacccaggacgtcatgatgccttccctgttttcttaatgataacttggcagaagaggagacaggctgccaggttctcctcgggtggttgcgtggtatgtgcacgtttctctttgcatgcgtttggctccctctttttttaaaaaaaaataaatatatctctctattttttttgaaaaaaaattttccccggtactgtcaggatttgatggcattactgcgtttgcataatcgacgcctctgggtgtgtatagatgtatgtatgtgcgtgtgatttcttttttccctttaaatcctgctgctcctgcctcccgtcgccgccgcagccgctgtaaaagcaagcatgcgttcctcttttgtctttcattttaccttcagggtgacattcagtgccaactgctcccttttgaccgtcgccaatccccgcctgggcaaaataaatttgcaaaaaaaaaaaaaaaaaaaaaaaaaaagccggagtgggggaggggaaggaggaaccccttcagtcccaatgctggggtgctgggttaccggatcccagatctacaaaacccacctcccgaccttagaaataaacatcttctctctacccacccggcccaggcagagaattggctggcaccaaggagcatccacccagggccccactcgtgttcgtgttcgcggttcacgctggctgacttgcatacccggtgtgtaggcctcacacaactggagctatttttctttaaatccttttttttttcttttaatggggaggaggtagggaagaaagaggagtcccaagctgtgtgtgagggttctatggacaaggcagaaaactcggggggggtggggagagggggcatgctggcatctaactcaccaccaggggagtttggaaggacataaagggtgatagcttttatttgacttattctaaatggcagtaaaacttttttatatagacaaagatgtgacagctgactatccaatgcctttatcatcttaatagttaggttccctgacatcagtagggagaggttctagggtaaccttcatacttccatctgtaaacaggaaggtaggctttagctggtgtggccacaggacaacacagctcgcagataacttatttttgtcaggcttccctcactgtctggcatccctacactctctcaggtcatcataataatgtagatatttgtactctgtgtatgggccttagataatgatgcccagtaccaggtccagttaacactttgtccatctttatcactgcttacccatttgtagtagtagaagagactaagggattttccccaaacctgaccatgaccttgttctctagaatgtattgctgaggtccctcactgtcccctacagattccaaattcctcaaatatgacagtacatgccaaggtaggggacgagggaaacccgtagaggagaatgtctgaaaagtggaagggcctggaagggaactttttaactcacccaagatcttcctcagctgctatctatccatttgaacacagtttgtctaactgaactggctaggtttcgggagaacaccaaggcacttgttgcatcttttccctttagagtcacaatccaagaatcgctagcaaaccccatggggaagacactgtaattatgcaaaagccagacaatcagaattggaggagagcctggctgaagtagactaagagggtcagaggactattgacgagtggcagaatcccaagacttgagcgcagcctctccacccttgacaatcggcccagatgctctggctctgcttatggtctctttggactgccaggagatgagctgatacatccccttggtgctgagaggtgaccagagccattgattcaagagacctacagcctattcagcatgcctgtctatagatgttattggtaactttccagtaaatagccaaaacatactggttaactggtgaacaggcaacatccagttctccgtgttttgtttggttgtttggctgtttcacttactgtccttagaaccattcccttgatgacataactccaggatatcaaaagaataataaaaaaataaactcgactaactttaatggcctgaaatacattattttttttcttttcaggcaaatgctgtccttgcttcagcaacccacatatcagtgcagggcccaagaggtcccttcccttggcagtcaatgctcaagttctccagaggtctgaatagatgattgtctgtttgcttgctctttttggggggtgggggtcttatgtagctctgacttgcctcaaccacccagcaagactcacccttgctgagtggaattgcaggcatgcaccaacatgcacggcctgcatggatgctttcaaagccaagactccaactctttccaaaatgcctctctgtttctcgtccaagttcagactcagactgtttccaaggttttcttttctgtctccatcttaaatacattggtcagtagagctggagcatgctcagtttgacctctcaaccaaaccaggaaggactgaaaaggtttactaagcagcataggacacatagaaagcaaggctttaagcttggctttgtttggaacatggaaatcaaattcacccaccaacacggcaggaggtaaagatgaggaatagctccaccttacacaagaacatcccaacatggagaaatttagacccaggttacatagcttggattcagatccaagggctccgagctctcattaccaacctattgccaactgttggcatcgtacctagactgcccccacccatggaccaatcaggctggtaactcactgctatctcacaggctaggtgaacaccctccttacccattccccagcatgccatgcctcccttccttctgcctctttaaattctattcattattccaattctacccattggtgaaggccaagctccaaccctgctgcatccacaacgctgttatttatgaccatttcactcttccacagctccacgatgttcactgctgcacagaacatccctgttctctatgtgtttggggttatttttaatcccttctccaccttccagttcctttctatcagaattatgcctccccactcccccatcttttccggcctatgcagcatggtgccaattataaaagcggctttcattcacacctctggtgcattaatccacacagaggtaccctttggagcacaataatagcacttttcaatccgatagaatttgaagttttatgtaacaaaggcgtccccaccccttcatctgaaaacatgcaagctggtctcagcacactgtagacagtcctcagaaaacaagtcatcctgacatggctgcaaaccctactggaatcctggcacctacaggggaggctgaggcaggaggagctcaggttccagggagggatgtacgaaagggaaaacaacaaagtcagattagtgatgagattacctaccttgagagtgatgctatggtgaggtggagtctggcctggcgttggggctgacgcgatgagcaggaacatgaagaaagctgctggaaatgcaatcatgaaggggctgtcatagctagctttgcatttcccgagtatgttttgtgattgaaaagttaggacatttagggtctgatgctcatcagatacacgaaaagctctagatgtgctactggacagcttgtgggacctcaagcaaaggctttggtacaaagctgtacaaagtagagttaaactaacctccaaggtctcttcagctctaggagtccgggacagaatgtgagggtgaagagagaacaagagcatcatggtttgagcatcaatataaacaaaggtgatcaagaccccaggcagagtgagccaagtgcaagtccctacctctagttatccagtataactcagagtcatttgaaagatagaattcataaacaaaagtatgtgttcaaacttgcattcaccgactggggatgtagctcagtgctacagtacttgtttagcatacagaagttcctgaagtcaaatacccagagaggggtagaaacagagattctacaagtgttcttttcctgcaagatgaaactatcaataatcatgcacactggtcacctattacaaccaccagaatgtcactaggcatcattcctgcttacgtacaatttattttccttctgacacaacctaatttgatatgaatggatccagtcattgtcttcaacgtataaacaagaagcagcttgaatgaaatgatggcacactttgaaaagcagagattgacaatagagagacttagggacaagagccagaagggacattttgtccttttgtgtatttcctgactgtagccactctctgtacacctatcttccctgttacccatctgaattgaatgcttatgctcattgacttttgtgttctcgtgtgtgtgtgcgtgcgtgcgcgtgtgtgtgtgtgtgtgtgtgtgtgtgtgtgtgtgtgtgagagagagagagagagagagagaggggggggggcaggatatttcttgtttatttttgttttgattttttgtttgttttgaaacagggtctcatgtaatccacaatgccaatgccagcctccaactcaacaagtagctgaggatgaccttgaatttcttccttcctcacttcccaagtgctgagattctagcactaggcctggtttacccatgactttctcaccaggtttttgttgggataatgataatgaaacagtagcaatgaaaaggatgctataaatacaaaagggttgtcagtcagatgtaccttttacacctgagtcttgtttctagaaagctttccacagttattagatcatgtggagccaagaaatcaggtccccttgtcaagaatccaggttggtttccactacagttcattacagaacctcccagagtcctacaactagttaagggtgcatcccagatagctgtgtgatcgatctactgctctgtccacagtttacctccaaaactgtggtctatactcaaggaaaatgggtgcccactcacacatctcaactagaagcaagttcattagaatgttcatttaaaatagacaggtataccatggctggtccatgaaaatgcaaataaactcctcataggaggcaaaggcccttaacaaggtttcaccacttcaaggatacatgcatgaggtgtttttgtattttttgttgtgtattgaagttgtgagttgagaagggaagggataggggaagagagagagacagagagaggtagtgttttcaatatagaagattcatatttttcatcacattccagatgtgtttctgatttttttaaaaaaaggttaagaaccactggaataaaaaaaaattgcttgttttaaaatggagattaaagagaatagatattcatttaaggcaaatgctatgcctactgaaacttggtagtgtgtaataaccactagtattcaaaatgatagccttgagacacaataaaagcctccatcatcaaagaaatctattttcaaggtattttatttaactgatagaggaagaagtatctgcctgccgaaaagagttgaacatggaatgaaaatagggctaatgctttcaagctggctaggcaactctgctgagcaaggcaggtcagggtggagaatgttttttgttttgtatagttttgttttgttttgccttttaaggaaggagaggcctgtcctgtaggtgttgaggtgcctaagaatgagggcagaatagaatcctaacaagtctggagagaggagcaaaggaggacacttggtagagaattgaagtcagctaatttcaatattgtgcaactgaattaatgctaggttgttgatgttcaaattaagattaagcaaatactgaattgagtttgagatattttgagtttacaatcctttagtacagctctgatttcactggccgtagtaggatctaggagatgtatgtggctgaagaaatttgagacccaccagtaaattagtgatggtcaaagctgttgataaagataaggggagaaggtataaatgtaaatgatttcagaccctgaaataaaactacatttatttgatcaagttctagttacataaaacgtgtaacaccctggcagaatgttggtgattttgagtgtgcagacttctgaatttgtaccgcccattgcagaatagaagtctccaggcatcctgaattttgggttattcctgggctttcccacagtcctctgtttcaaggctcagttttccatatgggatagcacaccggctgcctgggtgcacaggagggggggcagagctttccctggcagccaggttcaactggaaaaaatgcacataacgtcacctgatgccactggctcctgactatgtcctcatgaatgtggctctgccagctgctgaaccagcaggggaaactcagggtcatggaaagaacactaaacttagagtcagaactctgaagggtacggctcactattgccttaggctgctgctattgcagttcctgggcaaaccacccagccttcaatgtctggatctaccctgagtcagacccctgctaccattctcaggccagtcccccagagcagtgatattgaggtcataatccaaaggaagtcaccagtagaaccaaccacacgtggcccatcacctcttttatgagctcttcaaagatggcagcttcctgctccccactgtgggaactctcctgtatttacaccatgtccacacttctgagataagccctatactcaattactgttactctgtcatcatctagtgtaactgatgttttagttatcttttgactcacagtgtgtgtgtggagcatacgtgttgctccctaagtaagtaagtaagtaagtaatgaatgaatgaatggctgtcagggaagaatctcagcctacataggcacaaatctatgagaatgcttttgacttgccaggagagagcaggaccagccacgggtacatgatgcaagcattcagtggagcatctcaataataaaagttatacatttcttatgcactaccttgtgtattcagccatttttagggaataaagtcctttatttcctacccaagcttaaggttaaaatgcaaatatcatccgtccctctcttctgccccccaaaatgctaatactgactttattggttatcaaggtacaaacaaagcattcaagatgtttccagaaagctatgggaaagaacccacagggcttttgttcttgtcttcatccatggacagcagccactgaactggggggggggcacacccagaaagcataccaaacatcacattcctgagaagttttcagagtcttcctgtggccacatgcatcaagaaggaaataaacatcgtgagggttggcgggaaggggtcaaagaataatgtctggttaatatgagcagctgctggaagcagcctcctccttcccaacctctttgcatacttgatttccagaagacagggcaatggaacacacagatttttatctgcttctcagctctttgcttggttactgttatattggtatctttagtgttcccagaagcctatagttttaagacttggttcccagcctatggtgccattggggagtggcagaaccaggaggagattgggtctagtgggagaaagagcattggaagggaggaagttagaacactgtgagggaggggatgccctggaagcagagccaaggactctgcccctctcctgtctgttgacgtagcagctgccctgagatgtgtggctttgctccataacatagtcaggtatcatgtgctgtccagccacagtccccagaagggcagccaatccgccatagtcttaagccctagaaacaaccctctttatactgagtactttgctaccaggactagcatctgctgtggttcccaaacggtacatctattcaattgctcaacccatctctcagccctcatcagagaagtttctgtttacagcagacagtgattaacacagagactcacaaaggaccgcagtgcagagaatcagaggttgcaaaatactcagccctaaatggagcacacatagcacaactctcctttccaaggctcaaggatcactgtagaagagggagtggaaagactgtaaaagacagaggtggtgggtgacaacaaaagcatgtctcctgattgcaggacaactacacatgtaaatcatagtggatgccacagcatacacaagacttgtgtaatcctaagcaggaccaaattccagcgttgagagaggaggtcagcatgaaatcctacccctggctgtagagctattgacagccattatctcctgggagatggagggacggaccactttgtctctggtaggctgaccacatgcaacaggaaagtcaccacactgatggatatttgggcagtacacattggccttaatggaagagagaaagagagagagagagagagagagagagagagagagagagagagagagagagagagagagaaggaggagggaggaaagcaggaaggaaaatggacacaaagttgggtaggtagagaggggggcatggatctgggaggatttggagaggtgaacatgatcaacacacacacaaaactcccaaagaactaataaaaactatttaaatactgttgctccagtcacactctgcagaagtaaggtcagaacatccaaaggcagcagccaaggaatcacacttgctaatgaaaaccctccaagtagaagagacagctgggcaggtaaaaggccctgaggatacctcaagaatgtatgtcaaagatgaactcgatatctatctacaattccagagctcccacaggagacagaaggtggaggctggagaactccagggagctcatgtgaacacagtgtagatgtaaggaccaaccctaatgctgtcctcaagcttctatgtgtatgctatggcctgtatatgcgccctctctctctctctctctctctctctctctctctctctctctctctctctctctctctctctctctctccaagttattctagcacacagcaaagcttggttcccactggctattacagataaatggggcctcagctaactaaactagttgactgatacataatgttaataagtatcaataattagaaactagttgactgatacacaatattaataagtatcaatatacactggcccaaaacagagcagtttacagactccaaatccctcttctttcaccatcaaaacttttctggaaggttctttgtaaatgacccctaggtaaaataataatagtggattaattcatcgaagataccaagaaagcaagttttcaaaaggtgcatgaagcactttttttaaaatgctttttcattcttaaagtattgtaacatgttattttactgagtcttcacaacaagcttataagttcagcatgttatgggggcaaactgaggctcaggtctctgaatgctagattcctctcctggaccatcccttcctcggaagccctactggtggctgccagcaagacggcaattgcactgaaacctggcacagagcaacagtctaattgctctcatagtagtatccagcacatagcccaggtgcccacgggaggttggcaaaatgaatgtgcccaacaccaaacagtaagttgacttaagacattgtgagatgggggtgtgtgtgactctgatttgtaacttaatcatgagagtcttgaacaagagctctgtgcacaacgatgaaacagtgttgcaatgtcaaaaggaaggaaggcagcggggagaaaaagtgcttttcaacgttttatttttttaactaagcagattggtaattatttaatatgctgacaagccatgtaaatgtctaaaatttattccttccaaccttagaaaaccctttcaggcccagcacttgtcaggactgacaccccattggaccctgctgccctgacatcctcagctctctccagactctacccattgtcattctcttagggagaactcactaacttgtttgatttttaaaactgaaatatgtccctgtttccaggaagtcccccttgtcattgctaccttttcttcccctatcacgaatagctctttgcaaagcagctgataaattacttcttcatcttactgtcctatttgccatctctgtgagctccaaggatgtcccctcagcccgcactattatctccagcagttagaaaaaccaagctggtgttcaataagtctctggtaagaaaatgaatgtttgtcaaagagaaaatgtgccatgggagaaactcagatgaagacactgtctccaccattagtttgtcttcaagagtgtcttttgggccagtgaggtggctcagcaggaggaggtgatgccagcctgagttcaactccaggacacatatagtggaaggagagaaccactattttaaagttaccctctgacctctatagccacacctggaatacatgtgcacacacacacacacacacacacacacacacacacacacacacacacacacacaaaggcccacataaataaataaacttaattttattaaaagttaagcatctattctggtttcagtaattttcacaatctagggatatcaataagatgcaccactaactgaaaaataaggaaattaagatgattttatcattggttattgaagaaaaattatcacattgggcatgaccttctaattgtctgtgtaactattagcagatatggagcagagagaagaggtttccaaccatagatatgaggaccaacaaaattatatgtagctatgttctgtgcagatacctaatggatcctcccagggaactattttccactctcttataccacagcatgcttcgagaaagtcagcaggtcccctgatataaaaatgttaattattgactggtttcagatttcccgtaggtggactcattttctgaaaagagttctatagaatgtaacagatgtccacctgaagcaccactgtcacttggggcttccccaccatttacacaggctccaggatggaatcacaatgccctgctgtctatgcggggcttcactgagaaaggtcaaagtgctgggaacaactcaaatataagcaaggatgatgatggcccatggagctcaaaaaatgaccccactgactgagtccatcccgaacacagaaagcaacaatgaagcagagaatgcggtgacatgcttctcctccatgctgccctcctcttctagaaaaaccagctttaggaagaaagccctttcagtaatgaaagtggtatttattaaatactccagcaactacaaattcaaactagcatttcccttcaaaatagtcacttggggaggcgatgtaattacctcagcaatgctgtgattgctctaaacattctgggaattcctcttttaaaatcaccttcacagctgctttaggactcatatggaaaaccaatatcattttgttatggctttactttatgtaacaaaactactgtgcttcagtctgctgtggatttggttggctcttgctgtaggtcaaaaactggcttccagtcaaatgttcttccatattaaggacacagtgggccaggatggctgtgatggacacatagtagggtcagagatatgaactggaagtctgtgtttgaattgattcttcttgttttcactgtaaactgtggtctagaacatcttgttactagggtagaatttgggtgggggcaactacagcaaggcttgagtccctaacatttgttcactacccagtatctactgagtcctcatcattggctcaactgataggagcctgttagtgatgagagagtgaaaaaatactgctggttaaaccaaaagcatacccttatctggaccctctcttactgtgtggtcttggccagtcaagtggcttccaccttgtccttggagacaaaagagtaaagaatgccaactccagaaattttacctggattgaagtcctgggttattgctttattaggtggtcgaaacaaataaatcataggctctgtgactcagttttgccacctgtgaaatatgtctaataatggtacctatccccctgctagcccatgtattaagatgatgccaatgttgaacacagtgcttatttatttcaagaaatagtagcaattatttcttgagatgagatctgcatatataatcaaggctggtcttgctttctccatcctaatacctcaggctaccaaattctgggattacaggtgtataggaccatacctgactgcttttatcacttgaattatcataaattctagacatggaactccagcctcttcccttaacattagtacacagaagcctggcaacttttcatactgacaagatacagaactgaattccttcctgaccaagcttctcaaactactctagctccgcagctctcttttaaaaacatcgataatcatacagtcatgaaaccccaaatctaatttattttggattctcactccagccttactgtacatcctagaccagcacatttgcatgtgtgggcatgtacacacacacacacacacacacacacacacacacacaccctgcatttaatataaagtcatgctaaatctacctgtacaacagtttttcattgtgtgtgtgtgtatgtgtgtgtgtgtgtttgtatgtgtttgtgtgtgcgtgtgtgcgtgtgtgtgtatgtgtgtgtgtgtatgtgtgtgttcgtgtgtgtgtgtgtgtgtgtgtgtgtttgtgtgtatgtgtgtgttcgtgtgtgtgtgtgtgtgtgtgtgtgtgtgtgtgtgtgtgtgtgtgtgtgcatgaatctttgtgacagaagacaccctgcctgccagaccaaagcactaaatactcatcacttcataaaagtctcttaacttccttgtacatgtgactttattcagtcccattgtgatttctaatttgaaaatataaaaatcaagacatcaaaaatgtgacccaactttccagggattaggcagcaagccatctagggtctgtggggggtcaatcatgaaagctgcccccccagctatggtctctaccatacaaatctgctgctattctgtttttaaataagaacaattaaaatgggtcatgcctggcacacagagaggttgaggccagactgagctatgtagaaagactttgtctcaaaaacaataaccattaataataactcctgatcaaaagattattattgttgttgttgctatgtgtgcttttgcaatataatatattctaaccataacctatgatgttaaactacacttttataggttaacaaactcaactgagagaggctgagctgtcactttgccaattcaggctcttatggggtacagcctaggccaacaaagtcaccaccaaagtattccctgcaccacccaggtttgctatggccagtcatctacattctactaaggaaaacctttgttgctgtaacaaatcaccatttgtaaacatagtagccatctaaaaaggcatagtcattatacaatacactcagtgtggattaggggagggctgtgctccttatttttaactccatgaggcaggcattgccttgttgtcagaccttagagactgaccagagctctttgttatgagcaggggatgtactgtgacatcttcatcttcccgggttcaggtagaatgtccttgtattgaaccctggctcctttacacaggtcctctgtaaaacctgaagcttgactttctcttctgaatcactaccaactggactccactagattccctggctggtgggcatagccaccacctaccacttgctgactcttagagaagtcccagactgtcaccatggtaacagagtcagcacatcattttcctgcttaatttcccctctttccacctgcatgggaacagtcaatctaacactgctttatgttatcaaccacctctagcctcaggtcctattttctctggcctgtggttttcaagtacatgaagctgttagctgtgtgacttttgggtctcttagagggaaatgctaaaagtcatgatatggtcaccaagaaacatatccactttgccctagctcacatttgctttttgtaaccaatggtccttgggatctccttgagaactgatatcaaaggaaaacaactgactgaatggccatatcacccttctaacacacacacactcacacactcacacacacacacacacacacacacacacacacacacacacacacacacacacacacacacacacacacacacacacacacacacacacacacaacacacacacacacacacacacacacacacacacacacacacacacacacacacatacacacacacacaaaaaaaaaaaaaacagacagacagatagacagagacagagaactcatgttctttttcttggtgatccagcaagtttttaacttcaatgtaacccaaaccaggtatacaggattcaggtggttccaatatagaacctgcatataaagaaagaagaaagacctctactcctctgttcgtttattgttgtttaggtttgtttggtttggatttgaatttttcttgtttgttttatttggctgttggtttctttgagtatggagcagttccttttgttgctacagggccacaggcatcccaggctgaccttaaactcaagacttgcaaagtgcccaattctaagaagctgtgctaaacgagagttgtggaaactaagcttcccttaactgactccttggtaactctttctcatataaactggccaaccagaagtatcactgacatgggagatacgttgttgttgttgttgttgttgttgttgttgtttttgagatggggtctcacgatgtgtccctggctgtcctgaaactcactctgtagaccaggttggctcagggatcctcctgcctctgcctcccaggtactgggattaaaggtgtgcaccaccatgctcaggcactagagacagctttaaagtttgttccagtcattctctggatgactctgcctccagccatgtacccatcatatccacaagctccatattgccttggaatcactattgccctaacgcatgccccaccatgaacattcttcatgatggcaattttgcctatattatattgtcacatacctatcgtgatttaaaacttgtccttccattttcctttgttatcacctatctagaatagaaacaaaaaaaataatctggaatgtttaatgcagttgtgccactgagttgctaactaagtagagggatttcagtaaaactcaaagctgaaagtgccctgatatcttctgactgatgagagcagcttaccatagtcctaaaacttagaaaaaaaaagtaaaattcgccactgtgttattttatatcaaaaaataaataaaaacaagtcaataactgcacttactcctttctgagaactttggtgagctacccctttctagtgtcacgagactctgcctggctctgacttttctatcttggataaagttgagctcacattaatttttataagttgtgacatgacaaggatccaaacttcagccataatttattcatgggtgaaccaaacaccaatattttcttgatggcatcctgtgacttctacttatgtcccttctgctagtatctaaacattatacatacacattacagtattttcctctgtggttagttgtgaaagtttgtttcattagggaacagacatagaaaaggacttcacctcttaatggttgcatttaaatgcatatacaaacatttcactggaggtagctgggccaaaaaagttcaaagggacgttgcctattagatatatagtctatttctaggccccaaagttaatactaggatgtgtgaaatctctcctaaaattcaatctgagctacttatgcacaggggccactggattggcctccacacaattattttaagatgttagaaagagtgtttcccatctttctgatgcttggaaatagttagattttatggctgctgagtcagagccaaaaaaatatataattttatgccataatatacaacctttccctttggctgtgaaaatttatatgtacatatttatgtgcatatatagataaaaatcttcataaacagagtggcccatttgagatgaactgtatttaaagcatgcactctctcactctgatgatgttactgctatttaaaaaaaaaagttctctcataacttacccaaccacaaacaaatgccctaaactggtattcaaggatgcagttttctccccattatctttcccagctttttcttctactttctgtttgtgcccaagggtcagggcacagccacagctctgtgggtacatatccacttgtattcagaggacagatttcagctttggattttgtttcccaggagctgtctgccttgctttttcagacaagttgtcttattaaattccagacctcagcagttaggctagccagactggccagcaagcccaagattccacctgtctccccaggctgtgcttactagctcatgccacaagacttggcttttgttaagaagggctagaacactgcagtgagcactggggattgaacttgggttctcacttgtacagcaagcactctctaccacaacccctactaatattttaccacataaattcttaatatagttgaccatggtgagacctgacctcagtgagggaaaatcatctccattgggtgggtttctacttttcagccacaccactagcctttcgtttacctcatgttgaagcccaggtcagcctccacacgatcagctgggccacagacaacatatgcattgccggtgaatgccaggctggcccagccttgagatccatggcagacattgctaatcaatcttgatacccttctgtacatatgccaaacatggattcagaatttccctctgcacagcactctaaaaactagatgtgagttcatgggagtaagctgaagccaaggctagggaaatcccttcaaatcacctgcttggcctcattttattattttttcatattttatacaaatgcatagctgttctttgctctttattactcctccaccctcctcttactggtctcaatcctctgtcaatcatcccaattccgtttttgtgttatacatacatcttaccatatacaaatgcataggtgcagctccattctgcctataagagcaaatgcgctgttagtctctctgaacttgcatgctcctagactttaacacccctaaagatgctaccagaaggctaacactgccagccacacaacatggcagaaaatcagtgttgagaaatgagaagccataaggggcggcccatgcctataaccctggtattcaggacattgaggcaggagaattgctgggagttcaaggccagcctgggccacagtggaattctacttcaagaacagaaaaatgagtagcttttctgtatacaaataataacttacccagaaaggaaacagggggcgaacatcaattcagaagagattcaaaaacataaaatgaattacccaggagacctaggcagccccaccaaggagaagaaagacctctacaatgaaagctttaagagagtaaagaggatgccagaaggcagaaatgtccctatgctcatgttcacctctgtcgtgctcatgtcttcctaaggcggtagccataaggaactcctgatttgaactacactgtgatttctctttccagagcatgacatccatctgatcttgaatttcaccctacctctggtgtcttccagttggagtcacccctgttgaagggaccagaccctcatggagtcccctgctttagcagctatgacaggctgcagaaaagatccagcaagatgtagacctctgactcagcacatgtctgacgttgctggaccttcccaagtcactaggagatcagatatcctccacgtggcaaggaaccaatcagaagttagctagcaggctctggatgtgctttatggtaaagtggattaacagtatcacggagagcatagcaactgtcctgggtgggtctagaggccatagcaaccagttgaccgatcaacacaggacaggtcacccaaacctggaagtgcatcaatcctgagactgctgcgtaccctagatgctcgccttgctctccccattaaattccctgcctcatggccccttgggtccttttcagtgttttattccaagtgggtagccatataataaagtgacctaggagcaggtccacaatttttaagaagagtaggagtagattactgaggtccggtagtcaagatgtcaaggtactgtcattgatggctacaagagattgctctggtctgctctcattaccatctccaacacatagatcaagaggataaagacccaaggttgattatctctgaaacctaccagatatgtagttgaatcctctggtatactgcaatgccatgactagaacccagctcaacaaaacaaaatgccatgatgtgtgtgtctgtgtgtctgtgtttttgttatatatgtttgtgtgtatgtgtagaggtcagagagtgtagtgatttgaatgataatagtctccataagttcatatatgtgaatactgggtccccatttggtagaactctttgggaaggattagtatgtatggtcttcttggaggaagtgtgtcattggggtgagctttgaggcttcaagaacccatgctgttctcagctctctctccctcatgtgcttgtgggtggagaagctaagttctcagctcctgctccaggaccatgtctgcctgcctgcctgttgccatgttctctgccatgatggtcatggactccaatcctctgaaactgtaagtcccaaataaactctctcttggcatcttatcacaactatagaaaagtaactaagacagaggtccacactgggtatattcctcaattgctctctaccttaatttttgagacagggtctctcactgaaccgggaccttactgatttgtagactagctggctaacaagcttcaggatccccctgcctttcccttcaccagaactgtgattttaggtacaccaaactacacctgacttttaacaacatgggtgctgagggtgcagcttaggtactttatcttgtacagcaggcacttcaccaatagagcaatctccctggcccctaaaaggtcaagattttgatggaccacagttaaaatgtcagtgagtcctgctagagactataaaatagggttcactgcctggctgaagtcaacaaatagatccccatgacagcaattcacatgattttaaaacctacaaaccaaccatctctgtactggtggccttttggcatcccaatagataacgactacaaaactcacactcaagaaccactgagttatcccccacaaaaaaaaacctttttaaaaatcttaagctttgaaaccctgtctcaaagcaaaacaaaacaaaacaaaataaaaatcttaagttttaagtaagtttaggattttgtgtcaggccctacttggagttatctgagagtacttttgtcctcaggccattggtcacacatacctacatggcactgaaattctggcagcaacaggaaagctccaaaggaaaagccatttgagaaagtttgcaaggtttcataaactttagatgattttcaggacaaaaggctctctgcaagatttcttgtttctatggattgagactggccatggtggcacaaaccaataattgcagtatttagaaggataaagaggattaagatttcaaagccaccctgcactactcggcaatttgctatctccaaaaagtttttcaatggattaaaattccttttgactctttcctagaaccacagagccctatagaagccctttctaactttcagctctgtgctctcatgtcaccagtattccttgagggcagggtggttttctgaggctctgatcattactgtgggaaaccaacgaggacaacaaaatatgtacagcttttttcacttagacaatgcctatagagcgaggcggcaggaggttctgccaatcaagtgtttgccacacaagcatgaggactgagttcctatctccatctcagaagctcacataagaaagagaatagcaaagtgggggaggactgtggtcccagggctgggtgtgtgagtgtaatcaagctatactgtctatgtgagtgaaatagttaaagaataaactcttaaaataaagaacacggtgtctccatctactgattatgagttattaggatccagtcaaagcagtgtcctggatttctaaggaaatctcattagaaactacccaggtctcttgaaatattctttctagactgtccctcctggaacacagccaccatgctgtgcaaagtccatggctcagggccttaggtcaacagcccctcctgcattcccagacaacagccaacatcaactgctagccatgtaagtgacccatttggacttctgcctgttcaggccttcagatgtaactgtatccaaaaccctacctagccaacatctatctgcctacaactgcagaagagacctaaagaattgactgaccatcccttcccaaattcctgaaccacaaaatcatgagcaaaatatagcatctttaaggcaatgagtgttgatatagtcttcacaaggttgtatgtaactagagaaaagttgttaaaaaacactgtgtcctatcatagaaatccaaaacatgtggcattggctttgtgagcaagtgctagacaagagtcctcagggcttcaaagaagtagttagtaaaaatgggaagaaaagtcaagggagtgaggacttgaaagacaaagagaaaagatagtgttgggaggtaggaactgcagaaaggaacacaagttaaatgctgacagaagagttagcagaaagtttgcctggaactctacggaatgcagaagagacaagatgtgaccaaggactctaagaagaatgttaaaaagtgcttctcacagccacatatgatactcaggaaaagagggatggatcaagagaagaccctttgaggctgggtgtggtggatgaagaacagagagggagggaagatggttcaaaaacacatccataaaacctgcagggattaaacaggattctttctcccctccaatctctctcagaaagtattctccaattaagacatgtctaatgacctggagattaaggtcaaaccccatcttggctgagtctttggagagatggaagaatatgcccccacagagggtttccactctgaggttcacaattattctgcccttaaagacactatgctcacatctgaaatgtgtgcctccacagcagcttcaggcgggatacacagaaagagcccagtgtgatttgaagattttgaccagtaaatagccaaggtcataggaaggccctagtcagttcccttaatgtagttgtgttggaagaaaagatgtcaaccttgaccaaaagggatggcagtacaaaaccaagctcagacttctaccagaggtcatgggctgagatcacaatacagacctgggctttgttcctcctcagagccaatttcaggcgggcagctgtggtaaagctcacacatggcagtggagctcaggcggtttttaacagaaagatttatcgtaacagaatggtgtcagaagtgggataaccccatgccccaaggttcccagacaaagagggaaaccttctgccaagcctgccctgtcgggccgctgagaggcatgggagcagcttccatatgctctcgccatcccagcgctcttgggcattgtactcggcacttctgagatgataaagacagttccagataaagaaaaacctctaaaggtttacactgcatttaaaaatatttttgggcttgtgaaaaaaaagaagtaacaggaggaaataaagtagctggttgtggtggccaatgccaatgccgataggatttgctgaaggaagcagaggcaggcagatttccacagagaaaccctgtctcgggggaaaaaaaagaaacaaaaggaaataaaagtagaatagtaaaaaagccacctagagatgaaaaatacagagagaatctggatactatatgccatattgttgtatttaaattgtttgattgctgaggaaagaattactgctgctaaaatacatttgattataaatgctgctaaattaatccaacttatacattttaaaaatgctttgacttcaaaagttaagtctaaggacaggctacttggaaaaagaatttgtttgtgcttccacagaaaataaaaagctatggattctttctagactaatatggtttgatcaagcaagaccccaggaagcagtgacccaactgatcctgcattcaaacagctgagatgatacagccttacagactacaaaaacaaggacttggtcaggtttctatgttttatcatgatcctaatggtatgaacatcgcccccaatcaacaggaagcagtttagaaagaacgatgctcatattcccataaattatttataaatgtttgtttttatttaaatggggttagttataaatgataataaacatagtcaatctctttttaaagaaagaaaaggggaataggatataggaatgaatactttgcattggtatagattttcatttattgatacaactttaaggtcaattttgtaataggtatatgtctcttcttgtttaggtattgtgtttatacagatcctctacctataatagtcagaatttataattaggttagttaggttttctagatatacagagatgtatttgagatggataggtattcttcaaacctttcaaagacctacagaaatatggcatttaaatggtttagggtttttcttggcagtgagacacaactgctcctggcacaacaattacctcagaaaggaggatgggcatcgaagaaactagttatggagtttgcattcaacatggcaagattagccatttgggcaagaaactgctcttgcctggactgtttgttgctgtataaactgaacatgtaggacccacaataaaaacttataaaacaagacagtactgaagggttcctgttgaaatggagaagtatgccagacacactgtggcctataggctaaagatggatgccccaacattacagaggaactttgggtgacttggaagcaagatgtcctgtcaattctagagtttatatattttccttctgtggtctttgacagagttgaagacagatagttatggttgtagttttcttcagttattataaaagataagttacccttctttttatttagacagaaaagagggaatgatggggaatgttctgtgtctgtttatcttattgattgttgaataaaatactgtttggccaatggcgagcaaggactaggagtcaaagaggattctgggaaatttagtagagaagtgatgatccaggcaggaagtgatatggcaaggagactcatatctaagtgaggaaacaggaagtatgacccctttttcctcagctctggctccagcagcacgatgtgatccaccggcaaggagggacgccaaaaaggcatctgataagtcttataaaatatataggtttatgatagttaagactgagctaacagatgagaatcctagtcattgcccaagcatcattgtacctaatacaagtttctgtgtattcatttggtcctaactcaggcgggcggctggcgtaaagttcacacgtggcggtagggctcaggcggcttttggcagaaagatttatcgtaacaccaactgatttagtagtagagccagcacctgagagcagggtaataggatcagatattaactgcagaacggcaacacatcacaagccctcctcccgaaagtggaccagcagctgctccagacaccacatcttccagccaggtgttactcctctaccaccacagttggtgggtggcagacaacctgtcctgaaccatgttcaaacaaatagctcccaggcatccccttgcatatctgaacttgacatgtttatttgctgcattctttattttttgttaacttgggggtttttggttggttttgtttgtttgtttgtttgtttgttttttgacaggttcttactctgtatcctggttacctgcaatagagtcacaataatcctcttgcctcagcttcacacccgcagggcttacaggtgtgattactccatatccaatgaacttgatttcaataacaaaatcctgaacataaagccattgtcacaataaaaatgaagttaagggcctttaggattgtgtattcatttattttttaaaagtgatctcttatcacttgaagacaaatggtgggtgattatcagtgtctgccaattctctgctactctcccctttaaggatttggagggcagaatgaaatccatattagttggttttccagtactaccctgtcatgtctttttaaggctagagaactatgcagagcagggtcactatgctcgttcaagtgcaaaccatcaagataggaaccaagctcccttcccatgaaccttaagggacacactcaaaccatctctaaatcatggtccatctgtaacactatctattcctaagactcaccatgcagatttagagtattttcctatgctatacgaagaagaaaaaaagtttaaaaattttaagcttcctgctactttgttagatgagtacgctaataaggtatgctaataatgatggaaaccactaaggttgaggaagaagtgtacattttgcctagcatcagatgcttcttgagttttgtctttgagttttcattgggatcctgaaaggaggagataattgatgctcacatctccttccatagtttcaaaaaaaaaaaaaaaaagatttccacagaatatggggtaatcctgtcactatatatgcaagttcaaaaactgtttatattgttaactgtatgtggcctctatcagaatggatgtggactgcctctgcctggctcagccatgtaagaaggcatacgcaaactttttacaccacactatattgctatctgaaaggctcatgccctagaacaacatgatcaagttacaaaacataaccacagaaagaaatcacataatattctagttgacaaattgccttggtgtcacacgcatatctatactggagtacatgtgacctcgtggactcgggttagacacgcctgccagggaaaatactttctctattggaacccagagcactgaacgacacttgctgagagattgatgactaataagtgccagtatgcatacccccacccacgtttgtcttccgtgtgccaccacactcctggctttagggtgatgagaagtcaaacaccccacactctgacctgtggagccctacatctccaatccacccccaaaccctctcccctcccattcactcttgctgacttacccctgtgtttctggtctgctctcttcctcaggcacaaagggcatgctgttgagggaggcctatgaactgttctccctcagacactggtaaagttagcttccttaagtccagctggtctgcatccaaaagcccctccctcagagctgccccttttatctcctccataacctgaacggtcaccatatcttatgtgcagtggctcttccactatcacacaggatgaggacaaggagttttgtctctttttttctttaccatcctgaatcccaactccatacgtatccaatgtaaagaagaaaaatgaatgaatgaatgaatgaatgaatgaatgaatgaaatgcctttatagcagactacatctaatacacggttgatgaatgggcaactttgcagcaaactcacttccaatccacagaacagtagctttaaagatttttctcaatgacaatttttatacacatgaatgaaagatttattaatatgtttttctccctaagatcctgagatgttactcagcctgctaaaaatgtctggattctatgtagacattagagataaaatatattaaggtaggtacttttccattttatggatataaatatcttaattatcttgagaggaatgtataaagccatcaccgtggataatagtgattgctggcagctcctaactctggatgtcatcacactggcaaagtaccaggtaaagtataacaattttctactaattcagaccaaacgcataacaacccaggaggctcttgatgtgttcaaggtgagagctccgaaatatccatcagatttacaggcaaggcctcatccagaagctgggcgggttgcccacttgaaatacaataatcacatgcagatgacatcatgtcttggaaagttatggggaaactgtgctctccatcatctctcagattttaatacccacactgtttgaatgtttcctgaagtttaactcagatgttttttcttcctactttgacagtatgggggaagggcagaaaaactgtcagtcattctactgagacatagaaaccttgtgcttataaaggcaaggtaagattcgtgtgggctgtgcattgtccctgcctcctggctacttatactccaccttcactggagtcccctctgtccttctctctctgactgtcagccatgtagatcatggagggtatgggcttagcaagaaactattgttagagaatttggttacagcacgtgggacctgaagaacaagcctgtgagaacctgcttccatagcttcaatttcctgaccagaaaactgtcacttcatgaatatttgacaacaaaggctgaggggtagggatagcgtaactggtaagtgctggctgagcaggcttgaaggcctgagcttcatctcaggagcatgcttttcaaagccaggcatggtagctgcgcttgtaaccccaccctgaggaggagaggagacaaatgcctgagactccttgccagccagtcttatctgacctgtgattcccaggtctccatgagacgctgtttcagagaaacaaaatgaacagcatttgaggaacaacacctgaggatggtctctggcctggacacacatgtgtatatatgtgcacctgcacccccacacacgataatttacacatacacatgcctacctctatacataagcacacatacaaaagaatgcatcatatacaagactattaggtactttgcaaaaccaaaacaccctctaatggtagatattaacaccaacaacagcaaatacagggaacaccacagagcagtcaataaggactgctactggacttcacatcacctgaggcttcaaagggtcacaggacaccttggagcctctgcctagggtcaggtaaagtgaagagaattgggctctgtggaatttttatgatcaccaaatgaagttacatagttgaaaaaactaagtggaatcaaataagtaaactgaaataaagttctattgacctggtaattgctaggtaaatgcttgtcattgttatatatattagtaaacccatctctaagaggaactcactgttttgtgaactttctgttctccaaactgaagcaccataagttttctaatcttcactaaatagtactcccatccccagcctcagaggatgctttttttgatattcttaatactttttagaaactatttatagaaagcaatttctacaataattctgtttaaaaggtcaagcagatgatgcgtatttaatggttgaccaaaaaaattcaatttttttattttagatctcaccagaagttccactgaccttgccctcattaatctttgtctttcgaaagctcatctcttgagctttctcctaatctaatcatagtagctagaaattacttactgtgtagcagaccctgccctaagcattttgctgatagtaccttttgattcccctggcaagcctgggcagtaagtgtactactaacctcaccatgcatgggggaagctgagaatgaagaagttacataataaaccaagactgtgataccagcaagttgctagctgcagatacgaacccaagacatgtggttccagaccctgaggtcctaaccaccacactgccttcttaacccaaccattagctgctccaagacctcccagccgcttgcccctctgtgactggagttactcggaaacctctcaggtctacacttcccacattatagctgtacctgcagggcgcagctgtatccaacagacttgctacaggcagtcactggaatcagtatgattggactctctgtcacatgatgctcaattccgattctcatcattaagactgacaagaagggttaagatggcaccttacataaaacagcctgccaccaaatctgacgacttgagagtctgatccttggggcccacgttgtaaaaggtggatggagaaaaccaattcccacaaggtgttctacaaacttcgtatgtatatacatgcatgtgcacacacacaaataaattaattactgtaaagcctttttgatagactgacaagaaggaccacttggctcacatgacagagatttcacaactacacaagggaatgaattgtacatgcaaaggctatgtacacatgggtgggggggaatacagtccttggcttcagttatccacatatcccacgtggatggtaaatatgggacgttacaatacagatttctaataagtcaacaaaggacagtgtatctgatttcaggagtgcgattgaagaatttctcatcctggtcctggttaatgaaataaaatagcctcattcatgactgtgtgcaaactggcttcagacaaggtcttgcacaagtcaactttaatccgcacactttacagggcagttatagactcatctttgtcttggtgtacatagaagctgtttgtgcggttctgactaaattaaagagacaaaaacaatttcttttaacgaccgtgactccaagaaacagggatatccttttaatatgaatctctttagaactgtgctcaaaaaacaatccagcaacaggccatgtaaatgtcaagcctttcactacattggccctaatggccaaatcctaacatctaggacaaaaccaaaaggcagcaagtgaaaattaaacagtggtcgtaacatgtcttctgtattgctaatctttttcctgtggatttttttctgactccatttggtcctcagcataaaatcaaagctggttcttacagcaccaactctggcctttttctcttaacttggctgctggctctgatttacttaggagagaatgtcccttgagtaaatactatacggtttttaaaaataacagagacactatttgaaacaaaggttggtttggaaagtaaatgtaaacttggagtttaattacattttgtgtcttcttagccaggggtttaaaacactctactactgagctccaacttgcctttccagttgttgtcgttccttcttctctattaatggtgtgggagagaatatgcaggcctttgggctcaattggggtatacttggcaaatattatacacagttacagggatagctacaaggaacacgacaaaatgaaagagtaataagaagttggtggtggatcattgtttcgaacagctcacggtccactgtaagattggcataaatacgattatagcatggcaaatatgaagggatagaaatacatgtgacatccggtgaaaagaaccctcccaattctttccagtatacctgctcttatctctaatggcccctgaaagagaccagcggtgctatgaggagctagtggagactttcagggcttgggcctggtagaaagaagctagatcaacagggcagatccttggaaaagatattgggacatcaatccattcctctgtcccttgtttcctctcatgttcttcctctctctgctttatggccaccatgaagtaagctgcgtccttgtcatattctccctctgtgataaattgtctcattgtgaacacaaaagaaacatgctaaccaagcatggacaagaatctccaaactgaactcaagcaacctttttcttattttaagttcattatatttgttttctccatggccacaaagtggattaaacaacacctcacactttaactctctctccacaagcacacacactcacaggcacacgcacagactcagattaagaaaacaaatgtgaataaggaatcaccccagtctagcctcaagctcagagccctccttttggtatcctgagggctgggattacagacacaccatgacagactcaaatgccctcttccatggggcttctccatctcctctacctgaagcccgttttcctcaggtacatgggtcaactttcacatcttgacacaagacacaagccccttttgctagttagaatctccagtatcgttccatatcaactcaactctcctatgttgtgccctgttcacttcctcatagtgtatcaaagtggtaatttcatatttatctgtaagaatatctggcattagtgcccaattctgttataagagtgtaagcagggcagagaccagaactatttctgctcatagctgaagctcagcagacatcccaagagacaagtccaaaaagaagtcctccaaataatggcatggggaaagagcaatgtgctttccctggaagagggttggcataatatcaccatgtcggtgatataaagggccatgcctttggatcttgaaggattcataatcatttatcaggcagggggaacacacagaagcaagcagacagaaattaaacagtccgttgctgctcactgtgtttgaagctgtggtaggaaagagtaccatgtcagtacaaggctggagagactggaggacaagccatggagggcctcttgtgctctgtaaaacaatttggatgtgtgccactggaaatcagtgaggagttgtaagaagagaatgaaataatggtcagatttatattttagaataatcactctctaggtcgtgtgaagaatgcccttgatgagttgatataagacacagagtgactagtggggagaccatgtgaccatgctacaaatctatgtgagagatgacttatgagccaaagcagggatcgaggagttgaaaggttaaaaagaggtgaaaatgagagaaaggtttaaaaaaattcagtgactagcaccctctcactatctacccttaggagtaatggctttacagatggttcctaccccatccaactttgggtgggttttagagatgagagctcaggtcctcttcagtccacagagacttatttttcaaggcaattattctatcccataataatatagacttccaagtagaatcactacacagatagtcaccttcacctgtctagacctgcagacaatgtctggagtgacagggatactctaacatgtggatgacgttgagtccagagaagcactgtgaagacaaacctgggcccacatcttggcccttgctcttactagttgggtgactgtgagccacatgtgaaccactgtgaaacatgccaaggcaattcttgctgctctgaaagacaaatcacagatctcagagctggacccaaagaagactcatggctcagcatacaaaacccagaacaggttccgcccccctcacttcatggctttctttcccctacgatgttgaaatctctttgtttatagcccaacatccctgtctatggcccatgatagaaaaggcaccctggcttcctaatcacttcagtggggcggacagacactgtccatcactgagaataattgcttgatctcaactagatgcaaaggattctgggaagtgttgtacttcttagcatacgcttcccaggagaaagctacacaatggatatggtgaaacaatcaataataatcctctttgcttgatgtgaggacagctggtccatggaccttccagtctgtgtgacctaaggagccctgaatgatactagtctttttccccattagtgctccctctcccttcatcctaaacatgcttctgctgtgttcccagtagaccttacatcaccctgcttctgtctctatttacattcttgccttcttatataaaacctcaggcctatttcttcccttgtcaaagttccaccaactctccctgtggtctcacagcaatctcctgcagtgagccttctctgatctttatggccagatgaaacccctggaagcctagcatgatgctgttgacccttccatttaacatttagcagatgtctgtttggggccataccaacactgagtgcccctctttctgagaaagcctcagctacagtttccctgcagacagccactgatctctagtcttccccactaagaataatggaaagagtaatgctgctaagacagggagagctgaagaaccctcccacggactaaagagcgaagcgtgtattcaaatagttctggaaacactaagaatataattggcctcaagtatttaaatattcagataattgttgggttaatactatgtgtctttattttattttacatgagcacaggaaaacaaggtggtgagacccgattatgtgtacagtactcacctaatgaaaaggtggcatatccttgaatgttatggtaactaagaaaagcaaatattgaaaggcttctttaagaagtctctctgtgtgtgaagcaaggtggtgatgtggaaggtttcggggtaatttgataaatgtcaacagtttaaactatttaaatctatccatcaggggagggcggacaccactcttgttttgtctgagcaggtgccaagctcttctttttctgtttagatacagatacttcctgacagtaaaagagaggtaggggaggatgaagaggaggaggaggaggaggaagagggaagaagagaggaggtggtggaggagagagggaggagagcagagcggatatgaagagaaggaagaagagaggagagtaggtaaatatctggattaaggtaactctccccaaatgcccatgattccctcttccccacagctatgtattgagtcaaaactatgtacctagtgtctaatgaatcggcagttacaggcataggtgggctgtcatgagactcctatcagcctgccctcctcacactgactgctccaagatggtctcagatccttgaaggacatgataagcactcttctgcctcaagcatcttcagctggagagaacagagacacctctagcatccactctacatccaaatgtacatccaacccaggaccctcaatgacaaccttgagcctatcaggactcctggacttcagccatctgactacatccagcccccagtgttcacaccagtgacctaccatgaagacaccaccatagtgggtggggaaggaggcagatctggtgggtgccatagtcatgaataacattctccacgtctagactagtatcaggggtccttcagaagtcacagggcttcactgatgtattctgcacaccctgctttctatataaaggagacggggaatattgtagaaaacaccacatctcaaatcccctctgaccgtcatgagacagatgagttcactcaagcccctgaagcatcctataagaaaaggtgggacatccatgacctctcaagtaactatttggggtaacacacacactaacatcttttatctggaaactatggatagtttcatgctctctggaaaacgggcttggaatcagagggatgatgggtttaagctgcaggtctacgcccttgtgagttgtaccatcataggaaataattcctgagccaagattccctctatgaagttcatgacaccatttctaaacccacctactgtatgcagaactgtataaggagaacatgtatgaagttctgccttgaaggttggcaggcagaaaatacagactattcaacagcatagtaagtctgcagctgtcttaacatctggtaatatttcaaggaaaaaatcatagcataaaaagcatggtggcacaaaatgggtttctgatattgaaagaaaaaacaaggctggcccaactgcaccgtgtgcaacagtgttcaaccatgtcaaccaacctgataagctggtagacagtacattaggctcatacttatggcccccggaattcgccaaattgccaagaaggctaagaaatatggcattggccacagcacacagaacattccattgtttcttctgtttgacattggacctccaaggaacagaacctttagccttaagagtaataaatgacaaagacttagtttgaaatagacatatttacagaaggactatttgactagtaaaacacctttgttaataataattgcaattgcaaactagagtgcaccagaatattcaccataggttatgtatgcagttagttccctctctctccactcagaggacttttctagaagctaaggcaccatggccatcgctctgaatgaccagtaccacagcaggaaggttgaccgttttattctgaagcctgcttgttggaggaccggggttgcctcatttctgcctcagagatgacacagtcaacaggtactgaaatgagaggcctctgcatcgcaggggattcttgggcatctctaagatgcagcatcagttggatgtccactctatttcctgcacatttatatagtcatttgctttctgtaaaacgggttttgcgcataaccactctggtgggtttttaaaacagtctcatgtggttcaggatggccttgagctcactgtgtaactgaggatgatcacaaactcctaatcctcctgcctctagcaccctacgtgctagtatgttccatcatgtctggtgtatccagtgtcaaggtataaacccagagctttggcaagctaggaacgtactttacaaactgaggtatacccctagcctacctttctgatctttaaactttgttttaagtagttgctgcatggttcgaagagggtcacatgacttgccttggaaggaaatgtggatttctcttcactctagatacggaggttatcaacacactaaagaaagaattctgctggcatgatggcacacacctttagttccatcactggggaggcagaggcaggcagatccctgaattcaaggatgttctggtctacagagcgagttccaggatagccaggactaccacacagagaaacaaaccacctccttcccccccccaaaaaaaaagaaaaagattctactcaagtcaacctcctcactgaagagtctgccctgcaatgtgaataaatcacaaaagaggcacctgtgccaccgaagaagcctcatgaatgttactttcctaccgtcctggaggcccgtccaccttagccttccccaacctacataactttaggaagtatttgtgggtggtggtggggtactcatgagcctcaccgccctcctccagggactgatcctgtgaagatctgatgattgtcccactattcctcaaactggaaatggcagatccaaaccaaaagaaacagcagctcaccaaggtctcactgctctgtggtcgggtcacttctagcaacaaaagccttggtagaattatgcttgtgcttaaaggtgctatatctggttctcattggcattcctctatgggctttgattataacagtttttctgcttgccttcagcctgtgttagttgtaacaaaacagctgagtcttgggctcaagcagatagaaaaagaaacaatgcagccaaggtaggttagtgtgaacaggtgacagaaacaatccatttcaagtgatcaaagtcatagcaggatgggggaaagcagtcaagtgttgctagctggttccatgcttcaagataaatttggttaggtaataggtacccaaataatacacattgagtcaattaacatatggacttaggttttcatttgaaacttgtaggtattaaattttaagcagtcgttatactatagcagataaaccagaacaaggattctagaaccagactttctttgtggttcaatatctagttcttgccagcagtggtggcacagacctgccattccaggagtcaagaggtacaagcagaaagattaggagttcaaggccaaacttgcctatatggcaaactgaaatctagcttgggctacatgagactgcatctcacagacacgtaaacaaaaatcccagctgtctcctatcagctatatgagtgtttatccatttgttcatcatctaaaatacagaaaaatgagagtacctagtttacaatattgtttgagaaagtgtgtgtgtgtgtatgtgtgtgtgtgtgtgtgtgtgtgtgtgttgctacttatcatttatgctatacaagcattctacctctgaactacatgcattccccaactgcatttcttacttgtcattgctattatagtatttgcatttctatgccttccagaatagccttgaacccatgaccttctagtcttgggctctgagtacccggctacaggaaagtctgaccatgtccagtttattttttagaataattttaagtcttagaataatacctatgtaaacaagaaaatgcacttcaaaatgcttggtgtctcatacatattcttcacttttattcccaccataatttgaaatggaggagtaaccccatagtgaaggacagtgtgtccctgtaggtcctcaggactcttgtctggtaatggctacacatggcatttacaaagtgtccaatggcttatccaatagcacccttcgtaaagtaacatacacagaaacccagggaaactggtggggggtggggtggtctcaaacccacgtttgcagctgggcttgctatcccataactcaataactaagtgatataaaaatttgactcaaactaatgtgtgtattattttaatcaataaatgaattgtctgaaagcaaccaaggtgagttaagaggcaccttggcatttccataatgtccatttctgtgcattctcttttactgactttttaatcatgttttaagtcaggatttcagtatgcagcctaggttggccttaaattcatagcaatctccctgtctcagcctctgggatgttggtattacaggcatgagccaccgtgccagctaactttttaacaataccttgcagtaacttactttcccttctgactccaaggtctttctcccaggaaattgaccagcacattacctgactaccccagcctttgggctagaaactagttagggaaaatctgtcgacctttatttagattttcctagttcatgttggcttaaggcagatccttcatgttgtttaaacagaggaggctatgtgaaatttcttggtagatgaatttgatagtaataattttaaaataacaatggctaccatctggagattatcgggacaagtcaggacttctagtaaaacaaggtcagaggagacccagctgtttccctttcctgaacaacagaggtagtttctccctcctgagccatgctagtctgcttttaacaaagtgtagacaggatcgaagtcctcattatttgggactccgattatttcaggcttgggctcttttcaggagctgtgtctattgagtcttttggatgcagactgcagctgacatcagaagtacctgttgtttacattagaattcttcaaaaccaggagccagatgactccattgctaatgtccctgctatgcaagcatgaagaccagagtttgggttctcaaagtccaactcaaaaaagaacaggttgcttgctgtttgcaacccctgagctggggcaggaaagtggggacaggtgactcactgcagcttgttgatgattgagtaggcaaactgataaacttcaggtcagtgagagaccctgtctcaaaactggggtccaggaagacggctcaacagtggacgcagtagttgtgaaatcctggtgagctgatttagattccacagaaaaggtccctatggtaaaagttgaatgtgtggtacatctgtaatcccataatccctaaagaaagaatggaaatggagacaggggaatgctgaggtagctcagaggttggtgggtgggcagctagcagcacagaaggagtaacagcaaacaatacctgccttagagttgaaaggaagagcacttcttgaagttgtgctctggtctccacacgctgtcatgtaatacatacatacaaaagtgtatgtacatgcatgtatacttacatacatacatacagtgagatctaagagggtacccagcatctgcctcttaattccactttcatgtgcacccatgtgcacaaaactcacccacaccggtaaaaatatgtccatgcatgacacacacacacacacacacacacacacacacacacacacacacacatccatatgcacacacacaagcacaaacttacacacacacatttaaataataagatttttgttacctgaactttaccacatttaaaaataaaaacagtactatcttaggtatcttaggctccagtggggaaaatgcaaaggctgcttctacttacaaaatgtatcacctcaatatttacttttcagtgaggggaacaaacaagtgtgtcacatatcctcatcaggcttcgtaaggtgacctctatcagaactccaccccaaacactgcacactgaagatccttttcccctgtggcatctaccattagccccttgcccctgagtggcatttgtgagtttatcagccagcctgcagaagttttatattgttacttctctattttcaaatgtcctctgttaacagtgtagccactttggccacggttcactaaagggtacgtgtgggaccttttcccttgcaaattatgctgaaacgtgtaattaaaaatatttgaacattaattctactgggaagaagagggatagggtttcagagaccagtaactcgaatctttctttaattggcatcaggtaagtaactgggcatagcaatctatctgatatagggaaataaagagcgctggagacaaactaattattcagcaaaccttgctgaaaaagatgacatatgctttcctgcaacaagaaaactgtttctttgttttttgatttatttactatcacaagttagcaataaaatacaactttcagtcttgatatatagctcagcatttcagtgcttgtctcgcttgcgtgaggctttgagttcaatctccagcattggcaggtaaaaaacttaaaaacaataataaaatacagctttaacaaccaggtctatgaaacaaatggcagcttcttttttatttttctaaactgcaaacttctaacaagtatgttgcatgggtggggaaagtggacacatttaaaaattgggggaaatctatttaaaggaatgcttgattataagttccactggataagaggctaaagacataaagacacagggtaaagcgaactctgtgtctgaaaaatgggtccagtggcccgttcctgtggaaggagcagtgtcctggagtcatgttaacaatctgctctatgacttggaaatacctcaaagaattcactgcacaaaagtcacatttatcttttatgatatttctgtttgaatgtttacatggccagatttattccaaacctgcagaagaaggaggaggaggagaggagaagaaggaagagagtatttgaataattctagtttttttttttttttaaatccctttctttcatgtcaagtatgtgtctaaggatgagggcaaaggcagttttagccagaacaacctgggaaactggggtgaatcatcctgccccacagaagctaaacattacctggttcatgggatattattgcaaggaaatttgagaaatagaaattgaaaccaacccgttgaaggtgaacaagaacttgaaaagaaacatttttacttcatgtcaaatcttgagatggaggtggtcacaggaagctgtttaggttgtaaatgattctgactgtcagcttgtgaaagtgattggcccaaacacagagctcaccctcaaggtgtggctgagaccgtcaaagaatctatgaattttggtgcccccacgtaagctgtatgatgaagtggtgcagccaacagcagtgcagcaaggcagagacaagagtcccttgtccacggcagccccctcccttcttgccagctggatcttgggtctcagctctttgtctggacatgtgtgcgtttaatggcaaatgaaatccagcacggaaagcacactctcacctctcagcaaaaagatgccaggaagcaaggcagcacctaagctggggatatcccactgatggagactaggattcctcacccaagaaaggtcccattgtgctggggaccagacagagtggaaaagaaggaagctaaagggatggatttgtgattctatccaagcaggtatatcccttcttctagcaacactcagaggggtaggtggagaagggtgattgtggttgactctggggtcatcttaatccctgggtagctgagctacattcttgaagtgcaggtttgtagccaaagtcatgaaggtgggtctaaagagagggaatggggcccctcagaaagaaatttttaggtatatagaattctcttggtcagagaattcatattgcccactccaggacagtcagtagccaccaattttttttaaaggagcaggacgggtgggggattaaaaaatatccactgtttgcaaccataatgtaaaacgagcctgaaaatctgactgcactgtctctgaaatcatcacctcttttactgactgacttgtaagtcacaaaactactaaagagtttcagaaaggacacacctttgcaccactgtccagagttccttggaaataggccacattggagaggaacaattcttattcattcattccttgatttggaaacaaacaggtctcctgtcggctgccacctctttcttcccctggctattccttccctggttctagctgcttggtggaaatggcatgagtcctcacactctcaaggagaacttctccactaaagcctacacctgtaaggaaaggcccagggggctggaagccacctcaagacaagtgcagaggacagaactgaacctgaccagggatcccgcaagccagccattccagccccagcacagtggtgtgaagccatgccagtgcaagttacttttgcttcactgagcaaaggaagtttcctagtcctaaggtcacatcaaaacgtctggaggtgcttgcagatggcaaactttgtacaagccaaaaacttggggaagcccaggagccttgtgggctgtatccaacttcaagaaccagagtctacactaaagcagaatggcctagttgctgggaggggcacttggctctctccatctctggccagcatctctcaagcaatgacttttttagtccaaataaggaagtcgatgtcctgtgggtaaggaaaggttaggtttagaggtagctcctgcccttcctaaggcttctgttcctttcaaagcccacacagagcagcagccagcaagggacccattcccttttacaggggcctttctttcagtgtgactttctcctctatgtcttttccttcttctgcttccttccttccttccttccttccttccttcttcttttcttccttcttccccctaaatacaaggccaacagctcctacaaacccagaaaaggcattcattatcttaggaggggcaggagagaggtaggtggaatagagattatgaccgaggacttctagtccccagattaggagacagtagggtcagtgccaccagtttttagctatgaaattgtgctaagatctgtacttaaccacagctccgaaagctgcctggggatagtggcagaaactggcttttacttttggcagaggaaatgcaaactgtttcaagccggcttcagtgagactcttggcagatcaggactaggtgtgggcgcccccatccagcccgaaccagacagttccagcaatgtggagcctggagggaggagggacctaggctggcaacacacaccatgctgtctccttgttctgtgggcagtggggaacttccgatgtgcagagaggaccactccatgggcacatctacaagtgggtgcatagcttcatccccagtccaaccccaagggcaggcttgaccactgtgagcgaaatgaggcttcaaaaagaacactaagagtgagatccactgtgtcaagaaaattgacagcgcccacaaattatatggagatgcttgcagggggacactgggccaaggtagggatgtgaccccagattgtgcttttgctggttcctaactcgctggctcctaactccctaagctctcatttttggtcagactgctaggaaaccagccacaactttccctgcgtggctccccatcgacaccttgcctctgccaagattacaaaggacactttgacacaccaggaaggagccacaagcgggccaccgtgcgcctgcgggaaagagtgtctggccgcggctgagcgcgcacagccacccagagcccgtcgctgtccactctcgtcttgcccctgggtcggggaagctttcaatacccactacaccccgactgtcgatttccaaaactcagaaaccatgcttgaggctccggcgcttaagggggggtgggggggaggacaaggtcaaggtctaccctcagccgcggttcgccccgccttaagcaagccctgcctacaatggatgggaaaacggatggcagtccagtgtgccgggctcgagttgaggaaccttaccctgactctttctgaccagccccaggtctcggctttccttccttttccctcttttctgctcagagatgactcaagagcttgcagggcagccgggtagctccagaccgccatgccacgcgggggccgtggccaaagctatgcgggggcgggacgcaccttgtctcctacttccagagctcaggtgggcgcacgcggcaggctgtaggcgccctcgtgtcccagcctccccctcccctgggccggtacagtgccctgcatgcagcgcgctcactcccccccccccatgcccgcctcacgccaagaggccacaccgagtctagaagcgaactgggtttcaaattgcgtacaggctggagaggggagctaggagaggcaccaaaatggaaagggaaggtggcagcaaaaagagagagaactagagcctggctggaggtcggagggggcagaggctagggacagcgcgacccacgcggtcgcagcggcgagcgacagcgcctctcacgtgtacccggaggcccggcgccaactcacaggatcctgcgtgcggggtcgctgtccgagctcccgggaatgggtggctttgggtgtccccgagggtgtcctcctgctctcctgctgcaagaggggaaaacaaacaaatcgcgggacacctgcgaaacagggcgccgcgctccgccccaggagtccagcccagggttctggctgtggggtctatctataaatagcaaacttttagatggaatcaactaacaagtgaaaggagcctaaatttgcgaaggacccctctcccccttcacacacaccttgggggaaagaccccacgtcccttaagtgtgactctccgggcactagtagggagggaacttcttggaaggaggagtgggtttaaaagtctcaacaatttccagccctgtgttactttgcttggttccctactgcctccctcgccccacctgcagccactcaggactcaggaagggcaaagcctcctggtaaagagagagagggaggaggcaaaaggagggttcccccaggcctttagggagacagggaaacgccaggacatagggttcacttgaggttccgggacaggaatttgggcaatcctgcatttgggaaggaattgcgacagggtgaattcagaagccacaagagtaacccggagagcagggttgcccttcccgggcccaacaatgacctccagtgacagcgacctctctgggttggcttgcttgaaccccgtgtccgggaaggatcctagagagtcagggctcatacccggggcatgccttttccagtggttgcaggatttcgcagcagctggggaccgcaggatgccagcgatatcttcctcacttaaccctctccaccctaaaccgcccatgggggtacaccagccatctggcaaaaggctaattgtctaattgcctgggaatcccactccacgcgtccacctttctctggtcctttggccagtccgggatatgagcggtggtgagtgggttagttcgattttcattttcattttgtttttccaaaagtatgagcttggacgccaggaaacactaggcactgcaacctccctatgctcacgaggttttgcttcagagctgtgctggactttgcataaagaagagggacggaccccagggtcaatatgagtgtcaacgtaggttggcgtgggaattgtgtcaggaggaagagggtgaacagggtttgccctgctctcttgggaggctggcttctccacgcggggcctggcgatcacctgtgccaatgggccaggatggtggtcctttcattcccatcgttcacctctccccaactccttcctgcctacccactacaccaaaaggtcaaaggttcttggtgcaggttgctagctgggaatctcgtactggttgctgctttcccagcagcacgtcttgacagttttagcctcaggatccctaaacatatttctggagaatccagcctggctttgagccaaaggaaaagaccaagagggctaaggcatattgggtagcagcctttgctgcccttcagtgtccagggcccacgagtccacgcagacaggtgcgtgagcctttttttccgacagcacctgccaagtctatgctctgacacgcccacttggcgctttggacacgacacaactgtactgcctcgacttccccccagggaccgggagtccaccctgcttgtcctttagcaccggcccatgcccgagttcagaaagatactagaagcgcccccagactggaagagacagaaccctagaatcgcgggaccctcctgcctgacttgcgcgcaatgctacgcacctgttctggccttcccgctgccggcgccgagctggttgagagctgggcctggagcttgcagcctccagcggagcccgccctcaccctcaccctcaccctcaccctcaccctcctcctcctggctcgcctttgctctttgggacgccctgccaccagcagggcggtctttcctgggccactctgtgggctagtatttccagcccgctggaaggatatctctagactgtgccaccacgccacgggagcacctttcactccttgctggctctacggtgcccaccctgcatcccgccttagtatcctaggctttgaaactgaggtggggggctgtgcaaagagagaggctagaaacacttgctgaaagaggtgggggtcgggtgggtgttctggacggttctgagtgttcgccatagaggaacaggttttggggtgatgaacataatggatgtacagacagagtccctatggctgtccccaaagcctgcttcccatctattgttttacgcctggggagaagctgcgcagtgtgatagatctctgtagatcccatcactggaagaaaaatcctgctgataacgattatctcccggtcgtgctatcttgccatcaccccaattcatctccttctcgctccagcccctcggggagaagaggaggttgaggagctagagggagggtgggccaagccgctgccctcggatggagcagagagggaaaagcggcagtctttcagctccgggcttggaaagaggggcctggaggggttttctctctgccaagtctcgcgcgtgtcagatgattttagtctggtgctgcggtctacccatatacatttccaatctcatggctcataaactattagcaaaatggtttcattattcaccttctgcatcctacaaaggggggaaaagatggggcggggggagtcggacactagttaaccgcgaggctgtacaggcttaaatcaaggcttctactgccttcaagctcacagtcaacaaatctggggctttcgaagaatctgtctcccacccctttctgtcttgctctctgtccatctctatccatgagtccctaacacccaggttcctaggtgtcatccgcgaggcacaccctttaggttacaggcactcgggatgaattggttggaattgctactcccaggcccattggggggcgggggtgtgtagtgtgtgagatcacttgtggtccctaaattgaacatctaaagtcttgggtgagaagtgggtcaggttgtaagcaggttaaggtgcccggatggaaaccaagtcctggcctggtttcctctgcaagaagagaaagtgggaaacttagctcaattgtgggtgcagaaggagtgtcacagcaggcagagagaagatgggctaataataatcttgaatgcggatcctgagacgggcttctgcctcccgtcgcattcagtgaatcaacccgaccgaaagccagaagaagccaagtggctcctggcggcccaagagcccggtgcaaaggctaaaggaggtggaaacctgcgggcacgcggcggcaggtgcagcctcgagccagtgccagccggtctgctcctcctacggggtctatgataatattaagtatcttcgcacacgtttacttttcatataaatgcatttatctaaaatgactgttccccactccacaccccgcatccccatccacacttccccacactcattgaagctatgaagaacgctaggcgagcgagcgagcgagcgagcgagcgagcggtaattatccctgggtctgggaagcaatctggctgcaagaggcccttctgcaattgccggcggcggcagcggcggaggcagggcagcgcgcgggccggggactccctgcgctcgctgggtcaccgagcaactcggcccccactcgccggctgtttaatatacatggggtgggaaccgagcgaagccgatctctgagcctgcccgtcctgtagaaaaaaaaaatcaatttgctatttatttttgaaatatatagatttagggatttttttttctagcccgaccccttcaagaaccacggcccacaattaattacgtcttttaatgacttttctagtatttgcctgagctagctcacgttcagggatggaggttgggtggagtttaaggggtgtgtgtgttcaattctggtatcttcaaaaagattttctttatgtgttaattgcatgctgttatgcacatctgggactgcgtgctgaccaactcggaccaacttttaattaacacattgacctggcaaagaagcagccgcccagcctccccctcgaattatggatattaaggcgcctggaagcgcctgggcccgcgccgccagatgcgtgcgaggaattgcctgcgtccaggggcacgacgggtgcaaatcgcaactgctcgctctctttctgcgaagggtttttctctcctcacctccaggaaaacaacaaagaaaaaaaagcaaatgggcgggcgtttgggcgggcgtctaatacccttttctgagacttgaccaggcgaatgcagagtaggaggggagaccggctaaagcctgtttttatttaactagatttgggcctgggctctggactctttgaatggaccaagtttctggttgtgaagatgtaggggcaggcaagaatctgtggaaaggagagaggctatattgttgccttgtgaagttccggccctcttcctaccagtctccttgccttttgcccgagtctctccgaggcgaaacccaaaccccaaggtcctagatgtgagcgaaaaaagaccgggaagatgggggaggtgtctccctgctgacagcatgctcctgcccagggaggacaaagaaaatgagtgccttgagtacgctaggccttccccagaggctaggctcctcctccaggaccttctgctcagctggctaaggccagtctaacccctgtaggaaggagaaagaaaccctggaactgttcagacgatgccacctggagatatgcaatttcaccctaagtaatctcattcaggattgatggcttccccggagagctgccttccaagtgagtgtctagtctgcttccctgtagagcacaaatgcaggttaatccccagatacgaactcattttctctttccgtttctaatcccaacagccgtgctcttctcaatgcctagcttccgcatacaaacccataaaaaatgtcagagtggtgttccttctctcagccataaagatgtcggagtgaatcactccccagctactctttaacgtctcctccaggtaacagtggaagtttcttggttgacatttttcattccccaacaccagaacttttcagtacacgcgcaggaacactgagatggatgaaagacaatgtcagatacattcacagcgctgtgcgtcaactaggttggtgccatagaacatttagcgaggcaggcgaggctgcttcccaaatattttcttccttttcctaccccctgctgtccctctctcccaccctcaataatgggagggggcggtgattgagaaaagaagcatagaaaagatagccagccaggaccattctagacctcagtgtccccctgtttgttgagccgggtcttttgatattcagatacaggtgtgacgggagtgcgtctttagaccaaaataaaaccctcaggtggtaaattacagtccctttctttacaaagatcactctggaaagtgagcacaaatacgttccaaacagcttcgcgttgaatttctggagattccctgatactaacttgcgctccccaacggatctggaaaatagcagcgcacacctgatagccagggcaacaagagttggcgtcgctgcagctgctttctctcttgatttcctcggcctggtaagatggatgctgggagttttgataaggattaaaaacaaaagactcagcagtttgattgggaaagttctttattgctgaatagttgtgggtttaaactaaagaatgtgtttctgctggggacatttgcatgacacatgcatatgcattagcagctgcagggcgttagagcaccaatccctgtgagcatttatcccctcccccacccctgcagtcctaaaggaagtaggtaggaggctcacaggaaaacccagtaccgtttaaagaggcccattggctcggcaataacttgtttctttggtagatttttgctttttgaagatttgaagtaacttgcctccctgaccagttttctaaattaagataatagactgcgagtgtgtaaaataaaataaaataaaacagagaaagaggcctggcagtggaagtctgaattcaaaaaggatgctgacaaactgtcttcccttcattgaagctagcctgggctatatgagactgccttcaaaatataaaataaaattttaaaaaaaggacataaaggtaatcctaatgatgcaacggtactccagagaaatatttcatggcatgaattcttcttcaagtcagtcttcactccatgcttggtagaggtaagacctgcaccttgacccaaagtaaaataaatgttttcacccactgtgtgagccaagtgctgggactgttggttgatttccacaggggttgtcagctcctaagcccacctgagctgtattttgcatgactatttcttcttcataacaagatcaaaaatttaaaaccagaatgaactaggttcttaatttgtctaatgctgttcagtcattaggtttatttgtatttctttttttgtttttctctttttaattttgaaggcagagtctcacaagccaaggctagccccagacttaatctatagtggaggctagccatgagcttctgattctcctgcttccacctctcaaaagtgtgggatacaggcctctgccatcacaatttatttatttatttatttatttatttatttattttgaagaaagaaagaaagaaagaaagaaagaaagaaactagcaaagaaaagtgacatttgaattttgagcaaacacacacagacacagacacagacacacacacacacacacacacacacacacacacacacacacacccctcaaacatcaacataagtacattttaaaactcgactttcttttctactcaaagccaatacttcacagaattacctgagaacaatctagataacatgcagacttttccaccaaagtgtgaatgtattacaaaccaagcagaaatcttaccaaaactaaaattaaaaaaaaaaagatcatccctttcaggaattgtgatgaccagtaaggacatttatagttttccctactttttaaaattttattttgttgtggttgtgcttcaagttacagggaagttatttagaaaggaaaaagagctgccaatagcaactgaaaagctgccacccccttctctaagcgacatggaagcaccagttgcatgcactactgtacaaactcccatgcacagtgacacataaatatgcatgagtctaaatctatttttatgtctcatttccagatgtttacaaatactgccagttcactgatttgacctacccagaaattttcaaagagcctcaatacttaacggaatcccagctggctttattcaccatcaatgaaaagttatttgggaaaacaacaacaacactacaacttaaaagcgaaacatatacaggagcagaatgctgtggtttgaaggagaaatgttcctcacaagcttggatatttgaacacttggtccccagttggtggcactgtttgggagtattatggatccttaaggagatatggccttgctggaggaactatatcagtggggaaagctttgggggtttatttcttcacatcactctctttccctgcttcctgtgtgtggttaagatgtgacctctcaggatcctgccctcacccttatgccttccccatcatcattgatatccagctctctgggaccctaagcctccaaaaaactttcttaagtatatctacatagataaatttccgagagagagagagagagagagagagagagagagagagagagagagatgtgagatatcccagtaggtaaagcatgaggaaacaaatttaatccctggaagtgatacaaacagcttcatatagcaacatacttatagccccagggctagggaggtagatggggcataggggagagggatggggggttgtcatcactggggcttgttgaattgtcaatctagctaaattagggagcttcaggtttcatgagagatcatctcaaagaataaggtggagagtaagagagagagagacatcacactttgacctctagcatcccccaacacatgtgcaaacacacacaaacagacatattgcatattccacacacatatgtaaacatgagtaacttgatattatgcaatggaaatcatgtcaatgacattattgttctcagctattttaataatccatagaatatctggatactgaggctagcttaacactttaaattgtagcatgacccaggtctgatcttgtagtcaattgtgtctattccaaagttatacatgacatctccaaattaggtccagcccagaacagttgtttgccagagaaaacataagggccatcccagtatgcaagggaacctacactgccgaggaaaactttgtagcattcaaactacatgcattacttatagcattagttaccaaatagagggtatcatgtgttcactgtgaagtgcccttccaaagggctcatgcatgaaaggcttggtccccagatggtggcactaattggaggtgactggatcttgagggtgtaaaccttaacagtggataattgtatcactaagcttgtagatacattggttatttagaggtgtagccttgctggagatttgggtcaccaggggtgtggcttgaagggagcatattgtatattccttcccttctgtaattctttcttcctgacttcccagtggtgagctgatttgctccaccatgtctcctctctcagccagaccaaccatgacaaggccaaggacccatgggctgaaatgactgtctaacacagaatgagcattagtctacattttaaatggaatttctgaagcaagatttaccagtgagctgaggcaagaagtaaagaatagtcccattgggtatgttgggagggttaaaacactaccaagacccctctgcttaggtaaagcatttacattggttccatatagaaaccctgtcttggtctctctgtctctgactgtctgtctgtctgtctgtctgtctgtctgtctgtctgtctctgtcctccttcccttatatatgtgtgtgtctgagaaagatagatatacagacagatagatacatggacagaatagatagcacagatagatagatagatagatagatagatagatagatgatagagacgatgattgataaatagacagtagatagacagcatagatagattgatagagacagatagatagtagagagtagatagatagataatagatagaagatagatacacagtagatagattgagaataggcagatacaaagtatcttgggtacacagctgccacagtgcacctgcagtagtcaaaagtcacactcagatgttgctcctcaccatccaccttgcatgaagcaaggtctctcactgtccactatggcataaactagacagctggcccataagctctcggggtccttctgtcttcagttcccactttgttgtaggagtattgtggttacacatgtgcacgactgcatctggcgcttgcctggattttgagggtccaaactcaggttcccatgctcaggtagcaaccatttcacccgtttatccatctccctcacttccattgtctttgaaataaaaggagaacaggtgttgcgtaaggaaaacctgaagtgctattgagaaatgccagcatctcagggtggccagacttcacaggaacccactcactggctggaactctgccaggctcatgtggtgggtgacctggggggaactatgcttctaacaagtagaaaggaaaaggaatcacgctgcaatccacagccttctgggtttttcttaagaagtcccactgtgaggaaaagctattttgtcagagcctcattatgtttgtattaaaacctctcaaccaatgcagctccctctagccctgcaccagcagggaagggaaccatccaactccctcaaccatggtcaggcctgagaggtacaatccaggtcacagatggggacacaaactctccaaaaggctgagtcctggttcataacattagaatgttcatgacaaccagttacagctaactactacaggcctcatttcattggtttcttttatgcaatggtcatgtgtttctttcaattaaaatgtcacaaggcatattaaagaaggaatagagagattgaattaataccataagcagtatcaactctgtcaagacattggcatgccagaccaggaatgtgcctgcctgttggttggtgtttgtgttttaagtgctgggtgttgaacccaggatctcataccagctaggcaaatgctttaccactaagctccaactccagctccagaacagaatttttaaagaaatgagatttcttaatctaaggaattccaaggaaaaagtagacaacttgatggaagactagaagtttcaaaggcagaaactggagagaataattgcctttgttgggcgcataggcacttagcacagctgaggaaaggtagtccaaccttggaggataacttaatagagatttctgaaagtgcaaagcaaagtggaaaagactagaaaaaagatagaatgaaccatgtgacaaccgtgacaggacaacacacacacacacactatggggacacttgaaggaaggacaaagagaaagaaccaagagtagaaacaataataactgaacagtttttcagattaataccagacaccaaaccccagcttcaggaagctaagagaactcaagctggataaatgcccctccctgtgtctaggcacatcacctccaaacaagaaaattaatgaagaaaagattctgtaagaagccagaagggaattgggttttaacttcagaaaagcaaagagaaaagtcacattcaatttcagatgagggagagcagagaaaacaatacacaataccaccctagaatgggcatattctgttaacttacccttcaaaagcaaaggagtaagacatggcacaccttgtaagaccagcacccaggtagaggcagaaagtgaccaaaagctgagaccaaccagggctacacaggtgagtttcagggtagatcaaaaacttggattctataaagaaatgatccaagggaggagtaaggtcaaattcaaacttctgggctgtagctcaatgtacagcacttgtggacattcacaaggcccaagattcaatttcccagtgtccttaaaaaaagcatttactaactctgggcatggtagtgcaagcctatgatctcagcattgaagaggctgaagcaggggggttgccatgtgttcaaggccagactgtactacatagtatgtattgggccaagcagggctatataacaagacactataacaaaccagaataaataacagtattgattttgttcttaaagagattacaatttgttcaaagtaatagcaacaatacattacattacaggcatatatgtaaatgcttttgggtgtgagaattaaacgcaacaatggatctagaaacaggagggcaaaatcacgactttttgttacgaagaagttgaattatctgggaagtttaaagacaggcttggactcaccatgaatgctcactgtctatgtgactgcaagtgcttgaaaaagaagttttagaaagcaatatagtagatatatactatatatatctactttatatatagtagatatatatatagtagatatatactatatatatctactatataaaataaaaatcaataaatcttttttaaaaaagcaactatgaaccacaatgtaagctgtggttttcccccattgatcacaaggaaaagagagaatggtgttatatgaaaaacccaattaagcccataacagagagggctggtaaaggaccctgttgcacaaacataatgacctaaatgtaatccctggcacccctgtgaaaaagcctggcacacctgtaatctcatcactggggaggtacaggcaggatggacatatggacagccaatccatctgaattggcaagttctggatcagtgagagaatctgcctcaaaaaaaaaaagagtagaaactgttaagaaagttagaaactcacctgtgtagccctggttggtctcagcttttggtgactttctgcctctacctgggtgctgttaagaaagacaaagaggtcacctctatgcttgatatctacctctggcctccactgacactgcccatctgtacacacacacacacacacacacacacacacacacacacacacacgaatggtcagtggcaacactcacagtgtgtgagttatctggattacaggaagcctgggattcattccccagagctacaaagcctcactcaacacaaacagagcaggacatacaatgaaaatatgaaccgaatggtgctgcagagagagcacagcacttaagagcacttgctgctcctgcagaggactgggcttggttcctaccacacttgccatgactcaccatcgtcccaaactccaattccaggccatctaatatcctcttctggcttccaatggcatttaatgtacctggcacacaaacatacccacaggtaaacactcatacacataaaataaaaatcaataaatcttttttaaaaaagcaactatgaaccacaatgtaagctgtggttttcccccattgatcacaatgtgtcaatactttgactagtgtgtgtattccccatcaagtgtggtcgtttgaataagaatgacccccataggctcatatacttgaaagttaatcaccagggagtggcactgcttgagaaggattaagaggtgtggccctattggagtagtcttgttggaggaagtgtgtcattgggagtggactctgaggttgccaaagaccaagccaggcctggggacttgctgttcctgttgcctgtagatccagatccagaagtcttagctacttctttggtaccatgtttgggtatgtaccaccatgctctcccacacgatgataacggacatgaatgtactctgaaaccgtgagcaagtccaagttaaatcctttcttttatttaaaaaaaaaaaagagttgccatggtcatgctgtctcttgacagcaatagaacactaagacaactacgtttggagacttctatacagtgatcaacatgattctttattggcaagattttgtcttgtttctttttgtgtatcatcaaagcctagtatggggtgtgcacagccagtatgtttgatcagatcattgtcagtgttttaaaccttgagaagtgaacccaaagcctggccatagtgtgactcactggtaatcccagcactgagaaagccgaggtgggaaaatcgagaatttgtggcctgctggggctgcatatcaataccatgtctttaaatatatatttaaacaaatgaaaagtaaactcatgtctaaaataaaaactgacaaaaataaaataaaacttgacaatttcaataataaactttaatttaaagaaaaaaagaaagaaaaaaggaaggagatggaattcagtctgagtaaacctggtggcctgagttctagtcccccagaatccacatggtagaggagaaaatcgacctcagcaagacatcctctgagttccatgtgtctatacacacacacacacacacacacacacacacacacacacaccatacacacacaccatgcacacgcgcacagcgcacacacacacacacacacacacacacacacacacacacacagcatgcacacccctaataataaacaaaataaactttcaaaaaaccaaaggaaaggctgtagctgttgtgacttttagacagactattgacattccctgggggtccccacacacaaggtgatgaagaacctgtgccttaattgtcgctgtcatccaaacagttggctttagtcgatatctttttatcatatacattttaattgtgtattaataaacaaggggtttgtagcttattgatgattgcattatattattgactgcctctgcggtgccacacaccacttctgaagaacataaacaaggtcaaatgtaaaaatcacggagactgcatcaaagatataaagtagtggccccaccactgactcttgtggagaacgaatttaaggaaaacaggaatcttggaatatttctcaaaggaggaagtgattggtctatacaagagattaatctacctccaattaaactgcaattattgtaccaggacttgcaaagtgtttcttcactgtctgcatgttgctcctgctaaatccatagcatgtggctgatcccaggctccagtcagaagcctggctgaggtcctcaggaaatcaccccctcattgcattctttggaaattggacgttgcctcaagcccaccatgaggggtctggattttctccccccatgctggactctggcattagaatggtttccaccctttataggactcagcaatagcatctccagtcgggtgctgtccctggtcactcaagcccacaggacaaccaaagtctgtgaaccttgtacacttataggtagatggcctgatgatccagttacggttctgtgtggggtggccaattcaaagagagtgcaggcttcaactactcttttttcttcatgaaaacatctcaagtgaagtctgggaagacggttgaagtggtaaagaccttggtgcacaagcatgaggacctgagtgtgagtgtcctggaacccaagcagacacaggcatgaaggctgctgttcctgacctcagggctgggtgggtggagatgagaggatgcctgatgccagtcaagtagtgcacttggttagttccaggcctaagacccactgtctgaaaactcacacaaggtggaaagcatctgaggaagaacatcatggttgacctctgacctcaacatgcacacatatgcatatgtttgaatgtcctaagtagctgaaactacagacacaattcatcacaaacccaacaacttcttagatcagatgatgtactaggagtgcattagatgcgaccagggacatcacagtgatggagccgtgatgatgttttgcaaatttttatgaacatataattatttctttgaaaatttaaagtcaggcttataaaaggtaacctcacccacagctcatatttacatattaatacatccctcccccatgttctctgcatgtaaccctgtaactcacacttactttgggggtgagaactttgggaggttataaattttaatataggagttttttcttatcttagaattttaaatactttagaacagaggctattgggtgattgagaagacaggagaagaaatgcatttaagcagaatttaaaaaaaaacaacaacaacatggttttttacttgactgagaagagagaattcaaagaacaaataggcctaatgttctcataaaatatagtcttgtctttcttatggaaaaaatgtattcaaattgaattaatacgcctccatttgcatctgttaaatatgctaataacaccttatgtatatactgatctacaattttcaaaattcacatttattatctctttgatcttcataaaaattcagtgacacgggcaaagcaggggttattattcccattcaaacaagagaaacttcggatcagacgagacgaataagctttcatgggagaagctaagacgtcacccagcactgtttaatccttagtctgctgtccttccaaatttgctgtacattatcagaatatccaaactgggaacttatttctatctggcttctttgcttgtcactgcttgtcactttcaatgctgcttattgaagtcctgctttcctgtctcctttcatgactgtgtagaaaaccctgtaggccatcactctggttctccggctcccttactatcctacaatagcaaaggtttcctgatggaaggtgtccttctgcatatgtgtttctcttattggttgatgaataaaacactgtttggccaatagaggcaggaagatagatggggctaggcgacaaggagaattctggggaatgtgggcagagaaagaccccaaagagatgccatgtagagaccaggaagacagaatgcaccaggcattctctattaagccacaaccacgtggaaatacatggatttatagaaatgggttaataattaagacagagctagccaataagaagccctagcgatcagccaacagtttaataactaatataagtctctgtgtgctttatttggagctgagaagggtggcaggacctggcaggccaagagaaactgcagcaacagttctcaacactctgttactgtcttggccttggttttatctagaattagaaaaacgttttaatattttatttattcagaatagttttggagtcacctcttccgttttgtttgtgttgggtacaaggccttactatgagcccagactgaccttgcaatcagggtcttgcctcagcatcccatatgccagttacaggtatgcaccatcatgcctggctcaccactcaggtgtattaattcaattgaatacatttttccaagagaaaaaaaatattttttcagagagaatctgaagaatgtttttcaagttctcatttttcaaggtaaattactgaatctttcccagtgtctccttttgaaccttgtgtgtgtttagtttgctcctggattgtagaatcacttggtttttctggttaattgaattattttgtcctggaatgttcatttaaatcactaaaaactgatattcagtatacaatttcaagcaaaaatttcacattttcttggccttttaagagtagtttatacttactacattattttattttttattaattttttgagacagagtatcaatatgtagtcatgcctgacctgggacttactgtgtaaaccggactggcctgaaatttaaactcacagagctacacctgccgcttgagtgttgggattaaaagtttgtaccaccacacctggcctgcctgcactatgtttttatatgtggatttaatctctttcttagtaggggtatttcagaaatatttatccctttttgtagacttaattgaataccttcaaatatacaaaaggatctctaaacttattcattttaaaagagagtccactgcctttcaactgaattaacaaacaaacatcaaatagttaaaaatctggaacacatctacatgattagactgttgtacacacacacacacacacacacacacacacacacacacacacacacacggagccaatcttttttaagttgttcaggaaacaatacacatgtaactccctgtccagccccagatgaccaagattttctcctaagtttccttgcagaatttttatattttacatttcacatttgttgcaaaatattcttttacactgtgtcactgtaaagagctgaatggccattagctgggcaggaagtgggacttcctgggacagagaggactctgagaggaagaaaggaggagtcaccagccagatgcagaggaaacaggatgggcagtacagagaaaggcaatcaagccatgtaaaagaatgtagattaaaaaatatgggttaatttaagttataagaactagttaggaacaagcctaatctaaggcatgaaggtctgggatggatgccccaacattgcagaggaaccttgagtgactatccaggcagccagctgcttctgtcatgtctcataattttggaaattgcttgctctgcacttcctatttactcaggtaatattatatccttcttgtgtctttgatggagttgaagactaggtagctatagttagagttttcctttgtcaagataaaaagtaaattatgtacaaaactttaaattcatcaagataagatagataatagagtattttctccaaatatgccaaatacaaatggactggacattatgaatgtaattcttacatgataattgttcttattgtttataattttattatgttagagttaaaattttcaattttatttagacaaaagagagaaatgttgtagaatattcctttgtactgtgtgaagatgtgttactgcgattggtttaataaagagctgaatgaccattggctagtcaggaaggggttgtccaggacttcttgggacagagaagactcagagaggaaaatgcagaggaagcaggctgggcaatgtggcataaaggtaactgagctgtgtagaagattgtagatttaaaaatatgggttaatttaagttataagaactagttagtaataagctcaggctgagctttaataattaatatcattttttgtgagctggtggcccaaagaaaaatccatctacacatatttatatctatgatttccttgaagataacaactgcataaagtataagatctatgatttaagtttttgagattttttgttcacatattatatagcaattacagtaatgataggaatgcattatacttatgaaaaaagtgagcagaaacttcaaactttttaaacagaaggagtcttagatattgatctgagtatttcatgaaccattatacaccaagtttaaaagtctatgtggtgaatataacgttgcttacaaatgatgtaagcatcaaggcattggaagaggctgaaggacagtagatttaaaacaaacaaacatgtaacaccagtggtctcatgagcagggctttcatctattttatttccaaaagctatcatatcattattaaagagtaaagggaaaaaggaaaagcaaacctctaataataccacatggaagaaagaatcaaatagccttgaggggtttctttctcaatagatgccacaggagcttggagcccttaggctgccaaagccacacagtgtctagtgaagtatgaatatcacaattttgtcctttttggttctgaagaggtgtgttgatgcatggatcaagattcaaaagagattaatgcaactttattggggaagaatgcatttacacaagaagacggtgaccaccgctgcaagttccagctccaaggattcacccaggctgccctctgtgacccaactggaagcaagagagagccacctgtcctgaccccagacctaaaacccactgtccatcatgcccacacctgtgactacgcccgtttcttttgttgaactggctttacatatttgtgaagcataagtttacttctggagtctccgcatggcaagtaagtgtccacccctgtgtcagcaccaatggtgattatagcataggactatgcggctgcagaaatgcaaaacccaggaggtgttatttttcccaaataacttttcacattattttggctcttccactttcattcacttcaaaataatttagaaacaagttgtctatgcctacaacgaagcatgttttaacaggagcatgtttaacttacacatcaatcaggggagagccaaactattcattgtcctgtctcaggacagggtgtatgtctccatttacttctgatttatttatttcagcagattttttgtagtttttttttttggatagtttttttttagcacaatgatcatacatctgtttgattacatttacacttgactatttcaatgtgtgttgcaattgtaatcattattgttgccattgtaatcatattgttttctgcttttttgtaaatgttaattgctaccttatagagatcaaattggtttttacttgttaattctgttgtgcaacattgctagggcatcttagaatctttagatgggttttcttgattccttttgacttcctacatcctgctgtatgcaaattacataatttgtaatttgtgatgtgatggcttctttttctagactacatgtattttcttgctttcctgtacaatcagaacttctagtagcctcaaccaaattcaatgcttatttcaggtccaatttaatcagtagtttacgacctctgtttcaaagctgtttcttataattattatatgagattctatcttgttttcttatagtagttacctcctccaccctcccacaccacttttgtcatctgtctgaatctttgaaccagttatgtccaagaagggctgggcatatatctcagggatagagtgcttgccaggtgtgtactgagttcccatgcttgattctccaaggaggatgagcaggaagaggaggtttgtttattttttgttaaccttggacaactttaaaaaaaggtccttacttctcatcagcaccaaatgatggtgaaaaaatcagagaaagctcaaacattcccactagttgtagtgatttcctaagaaagtggtcatactgttttctaaaaagcctcagatattgttttatttttcagttaaaagaatatatttgtcacatcatagagtccagctaaacatagtgaaagtgcttgaatcacttagagatcaagaaagataggacggaggggccatgctcaggagattcactgagcaccatgctgacagactctgcatgcacagagacagtctaaggcagttcaagcgaaagccagctatggtgaaccttaaaggccagacttctagactttaatctgccagagtagcctaaagtcctcagcacatgagcctggagtagagatggaacactctcggagaatcaggtgcgctgaatgccttggaaggttggtctccaggatgaagtggcggaaatgagaaaaccccagaggccaggcgaaactgtagagggctgggctagggctctgtgagtaagatgagccccatgtgatcaggaggcgctcagagcaggctgaggatggggacaagccttccagcatgggagcagggaaggaaaactaatgctcagttctcaacagcacagtccaggagtagaagtgggccaccttccctttgttcttttcctcctgacaatacagaggagatttctttttttctgtgtctcaagctgatttaaaaatgagagatattcttagttatcagggaaaggcaaatcaaaaccactctgagattccatcttacaccaatcagaatggctaaaataaaaaaacaccaatgacagcttatgctggagaggatgtggagaaaggggaacactcctccattgctggtgggagtgcaaacttgtacagctgctgtggaaatcagtatggcgatttcttggaaaattagggatcaacctacctcaagaccctgcaataccattgctgggcatgtacctcaaaggaggcacattcacaccacaaggacatttgctcaactatgttcatagcaacattatttgtaatacccagatcctggaaacagcctagatgcccctcaactgaagaatggataaagaaatggtggtatatttacacaatggagtactactcagcagtaagaaactatgacttcctaaaattcataggcaaatggacagaactagagaaaaccatcccgagtgaggtaactcaaaagcagaaagaccaatatagtatgattcatacataagtggataccagacgtaaaacaaaagatacccagcctacaatccataaccccagagaaccttgaaccctcttcctgaaacagatggaagcagatgcagaaatccacaactaaccattgggccaagctcctggagtacaactggagtgagggataagcgataatatgaacacaggagtcaagaccgtgatggggaaacccacagaatcagctgacccaagctagtgagagatcactgactggggtctgacaaatggggaatctgaataagattgtagtagactcccttgatataggtgacaatggtgtgactgggccatgaggccactggcatcaggtccaagatctaacactaatgcacaaactgacttattggagctcattctgtatggagagataccttgctcagtctagacactggggtgtgggggtggagaggtgccttggtcctgcctcagctagatgatgggccagatttagtagacttcctagtggaggccttactctcttcatggggcagataggaggagggggcgagtggggaggaaccagaggaaagaagggaaggggaactgggattggaatataaaaattaaattaataaaaaacagaggggaaaatgagagatattaatatctgaaagaaaccttaatagttcagatattggggggggcagaaagatggctcagaggttaaaatcatcgactgctcttccagaggtcctgagttcaattcccagcaaccacatggtggctcacaaccatccattatgagatctagtgccctcttctggtgtgcagatatacatggaagcataatgttgtatacataataaataaataaaaaatctttaaaaaaaatagttcagatatggagattagtaaaattagcctattgaaagaattgggtgaagatttgagggtgggagtaacttctactgtgcttttagacaaagaatctgtcattattagaatttttctctttatctttgtatgtgtttgtgtttgatgtgtctgcatgtgtgtgcactgtgtgtgtgtgtgtgtgtgtgtgtgtgtgtgtgtgtgtgtgtgtgtgtacatgcacacatgttgtagaggcctgaggttgaagtcaagtatctttcgccattgccggcaaccatacattctatgaggcaatgtctctcaaccaaacccagagctcaccaatacagctaacccggctagttagccagattgttccaggattgcttgttgctgctttcctaggccagaattgaaggcaagctaccagacccaactggcccttgtgtggattctgggaatctgaaatctgcccttcttgctgatgtagcaagtgctttaaccacagagcattctccatagccaccattagcagatttccaatagacacttttgtttttgaagaatgaaactatttgcagtaggtgtttagtcacatggagagtagaaatgttttcctataacctcagcccttgggagcctgaggagggagggccactctggactgcatagtgacaccccatctccgtgaaccaaaatcaaataaacaaaccaaaagaagccaaacacagccattctgtggtaaacaggcgcggacgtgatttcatcattagcagttgaagccagctttggagagaaagatctgaggtagtgagaaatgatttatttctgtcttccatcattccctactcgcttcagtaacattctcatttgaggcataggtgtgcatctaccaggaatatgaagcagtgtgataaaatggattcaacccataactcccgtgtgtgatccatgtgtgtctctaattctgctcagctttcctcttgccatggtgttaatgttgaaatatcggactattcgccatggatgagctttccatacacttccaaaaacacccttttctcaagaaaagagtatttgtagaaatgctaaaaatatgtcaaaaagcttttctgaattcaagtcattcgcataactggtttggctctcacagcctcctaaaggtcacccgtgtggttatttgcattcattgcgccatcaacaaatataaattaagccacctgcaagaaaaggaactttaaatttaggcaacgggcatagacggggcccagaggatccattttcactaaatgaggctataaaaactaaacatgacctaagcattcttctgccctccaaaacaaggctcaagatgacagtaaagccaagaaaacacagtaccctcgatgaaagcaaaggacgcatgaacgcacacttactgctgtctccccaaacaacaaaggacaggacacatactggcaggattggaagaaccacgctctgctctgatagtcacctttccttacattgctcagatggtaaataggagtgttctctgtttctctgtctctctgtctctctgtctctctgtctctctgtctctctgtctctctgtctctctgtctctgtctctgtctctctctctctttcatacacacacacacacacacacttctcagagcaaaacgccatatctaacaatgcacaggcaggacacacactcttcaaaaggcacactcagagcttccaagggccatgacttggctatttgttggcatgctttccattcgatgcagaatctgggagtggtaaacacatacagtagggcacttccagaatttctccctagcaatcctgtgaaataactcacagggaagccaggggctttgaatcagctgggtaggttgcttggtggcagtgggcgacagagcaaggcaatggcagacaattggatatgtgctctgtcaccctctggttttctttccccttggcatcttagatttagactatgggagaaaagtaagcacctaccagactctgtgggaaggcagtttagtctaccatgtcagaacaagtgacaggaaaggggagggagaggagaggggagatgggaagggagggaaaagagccaggacatttgacaattgcagagaaaatgactacaattggatagttggagtagggtgaggcctgaaccaaccttgacacactggtatgtataaatgatagaagtaacttcaattctcataaacacattttataattctatttatcaatatatgtgtagatgcttatatatacatgtagaaatataataaacattatatggaaagatgatacacagatatatttaaatatatatatatatatatatatatatatatatatatcttcctttgtatttgtattgtatatttagatgtgcttatacacacatatacacgcatatacacacatatacacatatatacacatatacacacatatacatatatatgcattatacagatatactgtatctatatagaaaatctaagcaagtaattataacaagtacccaagttgccacataagtggggaattagaacaaattacggttatagaaatgatcttttttttttggtttttcaaaacagggtttctctgtgtaggtagaaatgatctttgttagaggaattattatctggtttatgtaaaattgtttgaattaatatttattcattaaaaatttaatagtgacttttatagactagatcatatccgcacaaaagtcctctaaccctacgtgactgtcatccagagatgggatatttggggagataattaatgctagatgaagtcataagtgtggggttttaatctgagaaaattaacatcctgaggtctctctgtctccacagacatggagaagaatctccatgaggacatagaaaactgaagcttgacatcctcaagccgggaattctcactaaaacccagcctagacagcaccttggtcttggattcccatccttcagaagctgcaagaaaacacattgccactgcttaagtcaccaacctgcggcattttgctatggaatcctgaacttgtaaccctgctatgtcacactctccctttcctaaaacaactcttccttcctttctttttctcctcggagcccttcactcaagtcccgagcacaggaacaaggatgggagctgaagccttcaacatgggactagggattcactcttgtttcccgtgagtgacctgtattcaatccccaggctgctgttgcgaatgtgggcaacatttaacatcttaagagaccaaggatgaaatctcttcagtatcactacaaacagttctctgctagaaaacgttgttaaacagggacacccaactcaagaacactacaaggtagtcaagtcattttgtaagccgtttaaactgcagcatcatcagtcagcagccttcaagtgagttgctttggaggcagcacatctttggggattcttcagacacccctgctacattcttgcttctgacatttatgtagaagtaaaatccagcaagcctttagcttgtcattcactgtcattcactgctcctgtccctttgtggaggtatgatggcaggatggagtcacacctcacccaggtgtccgttgtgtgaagcaaaccacctagatgctgtgacaccgagtgtgacttccgctttgatagtgttgagtatattaaaattatctgttattgtgtgtgtgtgtgtgagtgtgggcatatgtgtgtgccatggcatgtatatgtagatcagacatcagctttctggggccctctctgaccactgtggaatgtggtggtctcagtcatgcgtgggctcagtaaacatgccctgcaggaaatctgggaccagatcaactcctgcactttattaagggcaagaaacgccaatgaatgagaaataactctgagcccactgggcagttttcaaagtaaacagaggtatcaaggaacagagggaggggaactcctcaagtggaaactagctgtcgtaaactctcactgtaaaacacaaaaattaacttccctttgggaagtccaaaagaacctgaccttagcctgctccatctccctctccccaacaagcagcacagaactggtgtgtcagcatgttaatgtttacaaaacgaaacacttgctcttatttaaagcttatccaggaaaatggcttcccatatcacagcccccacctccgtcgacatacttgtgaacacaagcatacacacctctacacagtttattttaggaagctcagagtgtttgaacagtggcctctattttgcaaactttatgggtgaaaatgtgcaaatatttccacaactgtaaccaatgcttattcacctaacagtcacgtgaacgtccatgttcagaagtagttgggcttgcatgataccacaactactgaagccatcaggatgtcgaatccctgaggactgaagccaaggtggcaggaggaaacagcggggagtttctgtctctcctagtgccaccatcttgtgagccaatcaaagttcagattctgaattccccaaaccccgcctttatcgagcatatcagttgacatgctgcacaatgaagcccaaacaatacttaacacaaatgaggacgcatcctctgcccttgaaggaagcagaggcatagtgtgggggctgggtagtatgcacggactccctaatggcttctccgaggccctttgtatctttctgtgaaactgacaatcttcgtgaagtaagtctcctttgtccactctttgagatgcaatttccataccagaccctctcatgatgtgttaggcagtgcatgtgtgttcactgctggagaaactgctcatctccgtcaccctctttgagcccacaccagagcatgtacatcatcctctagctaaggccacccacaagacaagagaagtcccagtagcttcttgtctcctgtaaccagcgatctagggcagaagccacgcctcttggagccccaacaagctaagattggcttctatcccaatgagccaattagagatgagtgaagctggaagcagggagaagatacttaatccagggctaagaacaggagcaaataaaagcctccagtgcccttgagttctcagggttcttacaagggatttaagtttaaatagaagaattgggactgggggcaaaaggtttgcacaactaagaagacgtggtccaaatgtggtctacttgtctcagctctcatgcaaaatagactgagaaactgttcatctaaaatcagtgccgtcacctgaggggacaaatctggttccttgaagatgacctgcttctggctgttacatttccatcagagataattgctctcatcttggaatggttcaatcctgcactatttactgtttctggagtccagggtgactgcaggtttagggtaatcctttactcagtgtcttcagcatgggaaggggtgagatagttgaggtctcactagtttttagtaattactgtatgtgtgcagagccaatcaggtgtctgagccaaatgttttctcattctcttatctaggaaaactatgaaaaccaggctgtgcctagagtgtatgagtggcggtcacagcatctggcaaagggaaccttgtgcttctgcattggcttgtgagggataatcttcatattcaatggccggccacctcagttccctgagcattgaccgaaaatgagacaatgggagaagattatcaagcgatatggaaatgtaggtccttattcagtttattttaaaataaactcatttctctttaagtgaatttttgtacaatggaaaagtcctatgctatactgtatggaggagcaaaagagagagagagacagagagacaaagagacagagacagagagagagatagacagacagagagagagagagagagagagagagagagagaaagagagagagagagatggagaaacaacttccagtagaaggagcaaatttactcaactacagagaggcccttatctgcccaaattcctctaagcacagaaaggaaccttctatcgagtactccgaatttcagagcaggaccttctatgtaaatattcccaatcacagagagggattgtttgtgcagatatacccaatcacagaaaggggctgctgggccaaaagttacagcactgtcttacttctcttcacaatcttgcctagatccctttctgaatgcacacatgttgctatccttttacatgtcttttggtatatttcaggctggtcttgaagtcacattcatccatccctagcattctgagtgttaggatttaaggtgagtagcatcacccttggctcatacatgttgcttaatttagaaaatatatacccaatccagatgtctcatttctaaatgattttagttaatgaaacagatctgaaatatcaaccaatagttgctgatacagtaagagtcaagccaagacctgctggagaaacccacaaaaacagtgacctgacctagtaaaggcacagagacattagtcataaagctggggaaccagcattggaccgaaccaatgtgggtgccagcgaggaggccagggcagtctatgggacctctaacagtggaaccagtctttatccctagtgcacaaatggactttgggagcccattccctatggagggatactattgcaacccagatacacagaagagggtctaggctcttccccaaaggatgtgatggacctagatgattccccatggaaggcctcactatccttggggagggggtgaagggtgggttgggggattggtgggaggcatgggaagatgggagggagagggaactggtattgatatgtaaaataagattgtttctaaaataataaagagtcaaaatgtacatttgaatgactaaataaaagatggaaagaattttcccttgttctggatttagattggtggtgcagagaggtcagagagggcagagaggccaggcgaatataaagaactaagcttaaatgctataactcaaaaatcactcatcttcacttatcagtcctaagcatttcccagtagttcagtggcatgaaaggcactgttctttcagaaatagtttaaaatttagttggagaatcataacaaatcaacgtgcagatacacacatgaaacagacatgatgtaaaattaactccggattaggatttaagccccagacatttggagaagggacaggccagcagcggcggctgtcacagtcagatgcactaaggatggaggctcccagaaacagagctacagtcatgaacggaggtgaggctgctctctgcccatggacacctcacattaaccctgcgaggttaatctctttccataaatgaggaatcaggtcaggcaaatgaagtctctcaccaaggtcacacagctcaggtctctcctctatcaagtgctgtcttggctgtgaggtctgggctgttgatatcacaggacacaaggcaaagctggcctcttttggtccagcccctgctgcagaagccttatctcctaccatttccccatcgtctctgtttgagccacatctgtgtgttagaagactccaatcaagtcacacttcaagtttgactgaaaataatccagtgagacactatgttcagaaaagtgagcagttgggacatcagcaatggctaggaaactgctggtgactggcagctgtgggcagccactgctaccctggggggactgaagatctaaaacaagtgcctaggacagcaaaccccaaggatgctgaaatgggaggggccgacagcagcagaagcctctctgcattgtggggacacagagtgaaactgcagcttctccccaaccagccctgacagcagccacctctgctgtctcccactggtgggggctttaggtgacagagggcaagagagtctcagctgtctccatccttccagatttcgttcaaaagccatgtacagacttagttctgagtctcctctgaatgctctcctcacagcctatgtaccaacctttgttagtatccaaaatcatgatgttgaaactgacgggggggggggagttaagggaaccaaaggctgaggaaaatgtctgtcctcatttgatccaaagtagataagcaagcctatccatgagccctcgatgccaagcacgtagtgtctaaatttgaaattttgatttaattttggagttagggggaatacacagaagaacagaaggaagccatgaatgcatctcagtttgtagaatgttacctagtatgtgtgaggccctgccttccatcctcagcagtgtaaaaacaaacaaacaataacaaagatgcagtggggcaccctacaaccgccagcactcaggaggtggagaagggagattcagaagttcaaggccacccttggctacatagtgagatcctggccaccctggaaaacttgagatacatttgaagaaggaggaggagaagaagaagaggaagaagaagaagaagaagaagaagaagaagaagaagaagaagaagaagaagaagaagaagaagaagaagaagaagaagaagatcaactaaaagcaatagcacaaggaaattttgccttcctccttgttctagtttgttttctgtaactgagataaacattatgaccaaaagcaacttagattaggaaaggattcactttgcttatacagcctgaaaccgagtgtgccatcgatcgaagtcagggcaggaccttacagcagaaacctggaggcaggagctgaagcagagccaatggagaaaactccttactaacttgctttcttacacagcccaaggccaccagcatagggatggcactgcccccagtgggctgggctctcccatacaacgcacacacacacacacacacacacacacacacacacacacacaccctttaatagactacttgatctttgtaagcactgtatcactttccatatgaatatgtacctaagaacaaggacatttcttatatattcagagtctaatacgcaatatgatcagaaacagctctcacaaagatggacaacttaattgtgttgtggactataatcgtattatgtactccactgtccattttcaaatgatgtcaattgtaccagtagtgtccttcacagcattcttctttctcctgcagtccggaattgaatgctggaccacaaatcctcgtaagcagtttaacatctatagtgtcttttaatctggatcattcccttcaccaatgtcgacctccatgtcttcaaatattgcaggccctgacttgtgtgtagtgcctctcagcctagctctgtgccatggcttgttgcttctttgctgttggcagccaccccataaatgacattgtgtccttcccagggtctttatatcagcagtcagcagtcacaggatacttgtccccatactggtaaatccaactctgatgatggggtcggctgtgtctgccaggcttctctattatactctattataaagttactgttttaagttcataaataatttgtggaagatactcagactgtgtggatattctgttgctgttcaaaatccagccaggttttaaaaggaaaggagcaaatgatctaatgtcccacccctcctcactccttcttccagttgagataggatactctctgggtctaggggtcttacctatgaaatggtgtgtgcatgtgtgtgcttgcgtgtgcaagcacatgcatgtgcatgtgtgtggtgtgtttgtatattctctatgtgtttaagtaaaagtacatgtaagtcacaatgtgtacgtaggtcaaacacaatcttgggtgtctgctctcaccttctgccttgtttgaaatggggtctcattctcattctggacttggacaccagactagctggcctttgtgcttcccaggatcctctgcttctgcctcccagttccagatgggaaaattgggtttatacacttgagtttctgagtccagctttcatgggttccagggatgcaaacggaggccaccaagtttagccatcttcacagatcttatgtttcccctccttgtcttcttacaggagaaagctacaggagttgatctgagtctcagaaaaatcacaaagcagtgccagtagctccttgcaatggagactcagttctttcattatattctgctgtgtcgtcatcagcaagattctcttcctgccattttcagcttcaccaaacacctatcaaaaggaggctggctttccgttggcttattaatcctgagtcctgagtcatgccttgatactctaattattattgacccacatcatttttcttgcttaggaaaagatttaatgttgttaggagccgaagtcctgtaaaatcagagccaaaatattcctgtcctcagaccttgaagactaacacaaggtcaatatctctgtctttaaaggaatgtatttataggttgggaccagtgcctgatttcctttccacagctcacatggtgccatcatcacagtgagaactgatgacctgcaaggtgggtcctatgacctgacccacatcagacagatcttcctgggaggggggactcagtcattatcacccacttgtatgtcttcctttgtctaacatgttgcataacataagcaaggactgagacataacaaaaaacaaactattaattaagtcaccttctctcctactttgctttctattattgtgataatcaccaagaccaaactcatttttttagaggagtatatttgatttatactttcttgtcccagtccatctttgaaggacaattcaaccaggaatctgaaagcaagaactaaagcagagatgaagaagagctgcttactggcttccttctttcccatggcttgctcggcctgctttcttacacaacccaggaccacctgcccaggggtggcaccacccgcagttacctgtgttctcccagatgagccattaatcaagaaaatgtccctacatacttgcctaccacaaaccaatttgttggaggcattttctcagttgagagtcctccaagaccaacttctgcaaactttctatgtaatctgtaaagttttgttactttaaaaatgggtttttgtggggctaaagaattggctcggtggttaagaaaactggctgttcttccaaagaacctggcagaagaggatatggatttggttcccagtacccaaacggcagctcacaaccatctctaactccagtcttggggtatctgatagcctccactgtccatctcttgcatcatctcctacactcacggtacagatgtacacacatgcaaaacagccatacacataaaataaaaattaaaaataaatgggtttgtatagtatgtatgtgctgtgactgacttttgttgatttgttgcaatgcccctgagatcctttcatggattctttgtccccttctctcctctacccacccctcccctctccttccactcttcacttttccttccttccttccttccttccttccttccttccttccttccttccttccttcttttcctccttccttcttgccttccttccttccttcttttcctttccacgtcttcctcctctccttcctcccttccccccccccccgactcttccctctcctttcccctcctcccaccccctcttcttcatcttccttttcacattctaagaagctccctttggtttactttgcatacatttacggtgaacagccctttgatttacatatgcatagtgaaatgattaccacagagaagcaaattaacatctctcggttaccttttcctgtgtgtgtggtgaaggcatcaaaaaaaatccacatttgtagcaaattctttttgcagaacaaggtcaaccttagtccatatgttggacatgagaactctagaacttacttatcccacaaactgtagccctttgtcctcatctcccgaccctctccagtaaccacggtccctactgtctatttcaggttggctttggtttaagactctaaaataggtggtgttgtcctttctctgcctatttagttcacttgacacgatgtcctttaaaatcattggtgttgcaaagatcaagagcagaagtaacactcgtgggttttctgactgaggatgccgagtgaccagccacctcacatccctgctgccatgcctcccagaacgagggctgcatccaaagaaaaagatcctcccctccttaaaaatggaattaaaataaaacaatattaactaatacgtgagagcaaagcatgccagtttctggagggagtgtggtctggggaaagatgccagctggtgctgaaacagggaagagccaagacatttgtgatgtgaaccagagagggtggaaggggctcaggcaacctaatgatgtaagaccccagtacaggctacatttttctctttcattgacatgagatattattggggagttttgaacataggattggcattaactcatttgtttttaagcaatactattttatgattttcaggggggtgttcattttcattaattatcattgttttaggctaacatagtaaacaatgggtttcagataaatccttcaagccttttaggattttaacctgacttcaattcccagaatccaaacggtgggaggagaaccaacaagtaggtctctgacctccattggaacacatggatgcgaattcatgccaacacacacacacacacacacacacacacacacacacacacacacacacacacctttaaaagagcaatttttttcagcctcactgacctctcctcctccccctccccctccccctcctcctccccctctggttgcccctcccctttttcataggtattgtttcattaccatatccactttccacctccctcagaatctcttcctcccctctcacgatcccctagttttgtgacctaacccacacaacacagtcttaaatgtatgatcttcctctacaaaaaacccatgcaatacttgtctttctgagtcttgcttcatttgcatgatacaaaactttgtagtcacatcatttcctatgtgtgtttctgagaacacagctgaaactgcttcagaaggtaaggttccaggtggccccaagaatcccaaccgctggtgtacacaccctgtataaatcctgtaaacctcctcatttaaatgtgggcagggcctgtgactatggcctggtgtcatttctatgataagattactgagaggctgatcttgagctaaacaggcaggaccttcatcagagaagcagccacagcacgagcacagtgcctggcctggaagtaagtaaagggtcacattgtaaaattcaagtgagggccgcgtggttgggagtagggaagcctgggaactcagaatggggtttggctatcaatcagcaagaagcagggactttagaactgagcatcacaaacacccttaatgttgaatgaggaccacaaacatcagacaagattgaagcaccggctgattccttgaccagctctgaagtacagaacagactcagataacctgtccccagattcctgacctgcagaaactgaattgaacattttttttttttacttcaataacaaacaagtaaccatagcataagtttgggttgttcgtagcaaggtgtactgcagttaacatcagacatggctggtaatagcggaagcaggcagagcaatctgtcaggggctatggattgatgcagatgggaagtgtggtggcttggatcagaacggtcattacatgctgcgactgtcaagccatcagggtctaatgacagatgggatgtggggtgtgtgggcgaggtatcagagaaagccccaacacatttggctggagcagatgcaaattcaggatggttaatagcaggggatgagaagcctatgggaagcagaggtcttgagaattccatgggatgggggagcactgactaacatctcagtggagctttccaaaaggcacagggacggagtgtgggcaatgggcaggaggtccaggtcatagaggcttcagagttatcaacaaatacacaaggtataaaatcttaaaaccaaaaaagatcaatagcagctactacggatgttcccatgcctccaccatcatccctatctgaactttgtcaccgtcccagcagtgtctgggcttccactgtcagggcaccatctgccctctactttgtgggctgcagtgatcatgtttttaaaaagtttgtttattgtcattgtatgtagaagactgaatgcatgcacacgccacagtttgcatgtgaaggccagaagctgatctctgctttcaggatgagatccaggaattgaactcaggtctttgggattgcatgacaagtacttttacccactgagccatcttaaaagctttgctgcagtgattttcaaaggcattcatgccaatctgataaggtcatcgctctgttcagtgcctgtcctagttagggtttctattgctgtgaagagacaccatgagcaaggcaactcttataaaggaaaacatttcattgtggtggcttacacttcaaaggttcagtccattaccatcatggtgcagcacggtagtatgcaggcagacatggtgctgaagctggagctgagagtccttacatcttgcacaggcaacagaaagtggtctaagatactgaaaatggactgagcatttatgaggcctcaaagcctacgtccacattaacacacttccaccaacaaggccacacctcgaatagtgccactccgttgagtggcacattttctctcaaaccaccaaagtacccttctgagtattcctcactcggaattaattactttgttatattacagccccaatttagtgatctgcagcaatatacgtctattctcattagtctatgagtatgctgcctggttattctggtctcagtgctcagttgtggctggctggtctagaatggccacacacacacatgtgtctcgtgattgactagttggtcaatgaaaagggactcagctagagtagctgctctcttcctctatcaagctgccccaggcttctgccagtggtgggctcagaaatagaaggatcagccagagaaacaagctgtaagagcaaggtcagtcccactttctagttacaaacatttgctaaaaacctactggccaaagcagttcacaaaggactccccggaatctaggacttggagaaactgttggtgagagctgccacaaattacgttgcagagaaatgacaggaagaacaacaagtctggctttcaaagttctgcatgacctgatccccctccccacagtctctctctctctctctctctctctctctctctttctctccagtcccacctcacactcccttttggctgaatttttttagaggagttttatgtttacagaaatattaggtagaaatacaatggttccctcacacccccacccaaacagacatggagagcctccccaaccagcaatgccccatcacctgccctcttaaatcaaagtgtatctgtaatttgattcgacaagctattggagaatctgctgcatcctcaactagaatattctggatatgtgtagtggggctgtgttcatgggtgtgggggggtgcgtccatgtccgtgtgcatgtggaggacagaggttggctttggatgtcttctattcttcctcatcttacttgtgagacagaatcgcttagatgaatctgtagctcaccaactggctgcacgctctaggaagtagctccaggaagccttctctctgtctccagaacaatggttacagacacccattgccatgtttagctttctatacaggagttgtgatgtgcacatagaacatttaaggtctattttccacccaagtactaaccagatctgaccttgtttgtcttctgagctcagtcaaggtcaggtacatctagaggggtatgacaatagacttgaaacctattctcttatcacattttgaatattaatacattattattaattacggttaatatgctgtaccttagcttgccagactaattctggaatgttctctacatctctgatctggacagggcaggcttctccttttccctgaggcttcaaattgaaagtctcttgagcaggcattctctgaggtggttgcttccttctgtcctcagtgtgtcacttactgtcccctagtctgtgactggcttgtcatcttgctcatattcaggtctcccttcgaatagtcaaataccagttgtgaaaaaagtcttaaaacctagcaaggagtgtgccctattgtggaaactttgaagcctgactacactgaatcagcccagttcacctgaattctatatgaagtctgaaaaaacaacacttggtaagagactagaaaactatttttaatggaaaataattgacttttagatatgaggtaaagttactgtctctgtaagaatatgtacacgatggagttcctttctgctctcctcagggctgtgactgaggtggtaatgatggtgcctgaacgagaaccctggcacctcacttcaggccttctgaaaactagaaacagaagggaaatttgtgtactttatgtccttctgtcatagactcaaccctactcatggactggttttctttccagctgacctgtcgttgtggattgaatgttttgtttcctcggaacgcatatagtgaagctctcttgccttgtgatggttgattgcaatgtcagtgtctacagattagaatctcctgagcaaggagcctcactggaggaactgtcttgatggatgccagcagcaccttctggggcagcgaagacacaaaggctttcccctgcttggccttccctcttgctgccaagttattcaccccattgctgctgttgttgctgctgctgctgctgacagtgaccatgatgatggtgatggggacgggaatgatgatgattccttcttgaagtcagaactaacattttcaggctttctgttgttgactgaggaccagtaaccctctaggaactctctagatttttggtgccaggttgtgacttctgaagcatctagcctcttggactgagaagctacagggtcctttgcctttcaggtgtgagacttatattgttactattttgacataaacaattgataaattctcttacacaccattcatgcatacattcttcctatcagtactgttcccctatagaaccccaactaacacacccccaataatatggtgttaggggaggactcaaggttggggcccctgtgatgagattaattcccatgttactagaggaagagatactgtagcttatgacattctcgacatgagactcggcgctaagggagaaggctctcactagatcccatcatgggcggcccctgagataaagctgtcctaaccaagaaaccattttcttatttaagtcaccagggtatatatgatatttatttttatatcattttttgttttttgaagttataattatataatttactccttccctttcctccctctaacgtctcctgtgcttcaggtctcttgctgcctctcaaattcatggcctctttttctttaatgttgttcacacagagagtcagaaggctcttggagagtcaaccctagacaaagaactccaggtaactggggatgctgagagcaggagaagtggtctccctcagggaagagcactaagttggttgtccagtaccaccaagtggacagcctgagatcatggatgtacaggcaatgctatatagactgagcaggtggtattcacctattttgacaagagctaagacatatctttcccatctttttccttttctttcccactgagcccatcatgactggatccattagatccaagatttcaactttccaggaataatgatttcatctacactttctccttcctctttgcatcagattcatttgtctggccacccactctgtaaaatgaaccaatccctgtttcctgtattctatgccagcattcatccacttcctctcttggactctggggaaagtcccttgtcttggcagccagtagagagctttcaggtgccaggctggataccgtgagtctgtatctcaaaaatcaagtgcaaacacacaagagtgcaactgaaattcatgggtgagtgcaggggacgagaattcctaagactctaaaacactgatattggcgtctggccaaagtccccatgcagaggcaatgttaaaggctactcaaaactttgttttttttccttctgagcacaggaaccgcccgttctcatccagtgatacatttaaggatgtaatacatattttcaggtctgcggatagcggatagctagttggggaggattgtgacacagttgaggaatgaaattctctgaggtttatccatcaaataaaggacaaggtgtttgctgaaagggccactatgcagactctgcttcccacagggccgggaaagatcttaggaagcctttgagtggtgcgtgataagccctggccacacccataggcaagctcatttgggcttcacagtaagtggctaacagaactctgtaaagtaaaaagtgggaggaaataggaggaaagctagagaaactcagagatctcaagaggaacaagacaaaaggaagccagactagttgggaggaagttcacccagttccattatcagttcggtttgtaatggctgcttccctctgtagtctctgtctaccctgtggcagggagaggagatgttttgactggaaagggatgctgtggtagtgaagattccttccacagcctttctagtccggctctgtgagctagtttgcctcccacctcgcctgccttcagaggtcctggcgattgtgatgggatccagttttgtgatggttgatactcctacagcaaacagaatcctgcttccaattttgtttttttaatgcccataacacttgtgagccactgtgggccacaaagcatgatctcactgactccagggcagagatggagagttcgggtatgttgtctatacccaaaatcaagcttttgtctaggttgctctttgctttgctgagccaggttttagtcacaagacctttctgggtagcaacctagaaaagcaaaagtttccacattcctgagagtggcttttcacagctgcgggatcaggcaatgagtaaacaacactctggcacactctgagttgatgctgtatgattcctcagaaaaactccagaagatgggaggcctggttatgcagtactgtccataaccggttcatgtgccattcctgtgtcacagtcccattgacggagtcaggtttccatcttggaatggaacacccagcagggtttactaataaagagaaaagagctcttggcttatatttcaggagtttacagtttaagacaaagtggcctccatgtctctgagcctctagtaaaggacttcatagtaggcatctctccctaaagtctcagtcacttcccagtgatgctcagctagggtccaagccttcaacacacggttctgtgcagcgctcgcactcaaactctaaagctggcaccttatacaggctgtcctggttcagtacccatagaggccttatcatatcctctgcgtttatgtgagttcaaagcttcaataacttccagccaccagtgcatttgctgtcattccttctcttattttctctgtccttgtgagtttatagttttcaagattggaggtaacggatggctttgggtcactcttcttcctactcgatgctgagcttcaaggtcacttcccttggaccgttttccaggtcttctcaacaaagtgagatttgttttcctgttctgtggcctccactattagctgtgggcgcttaacgagatccacaacagcaacccttttcatgcatttcccaccgggacttcaccgccattcataaatctgattttggtcaagaatgacccatggagtttgcatggctccaagtttttcttccttctgcaaagtgtgggagaccacttggttcattcacagaaaccgcttttcttttcagtcctcctttcagtcttcagaatcacagcaggcaccaaagccagctgtttgctaggagagggtgatgtcatgcaaatacagactgctggagagctgacccggagaatggaaaagcagaaggaggtggagttagagttgatgcacttaacttctggcccaggctaactaacagcccaactttcagtatctgacaatttcaactacccttaaaggtagaatagcccatcatatttctgtctcccaggtccctttgcctgtgtaaaaagattctcttgtcacttccaggcacccgtgtctgcctggagacacacacctcggatatcatccctaaagatacttgaaagaccttcacaagacctccagccacagtacaaaaagagaaggcgaatttggcttattaagtcttattcatgtaaggcatcttaagggacaaaacaaacaattgcttccactaacagcatctgaggtaagttacagatagacaaaagggtatttgattaaaataatgctttaaacagaacaaaaggagtgaagtggtccctgccccttgctttcttgaaagtccttcatgcgatgtccttctccctactgcttctgattctaacggtagctgtgtagggcatataatgcaacatttataaatcaaggaagccctcgtcttttaaatagtattctttaaatctccactgctgacactctgactatatgcacagtagctgtaataggcgtatattttggaaaatagtgaataaaatctgacaagctatctggggaatttgaatgtataattgatagggcataaattaatacaattaggcctttattgggtgcagtgtctgccaaacctacaaaagggacctggaatgaatcatggctgtggtctcgaggctgatagacatcaatatgtaacgtggattatcccaagctttctcacgtggcccgcttatgatagcactgagcttaattgaaatttttatcttcttgtcacatacagacagttttggctggccatttcctttggaaagaacagcaaaccaggtgattaaaaaaatcaaggttttcaatgaaggtcttaataaaaccaccttatagagttctaggcacgagtgctttgtggagccacttggcgccctggcatctgaaagctgctccactcagtgagttttgtgagtactaaggaggcatgtccaagccaaagtaaaggtgacagagagctcagtcacttcaggtgaacctggcgcccctctgtaaacccatggctggcattttatggaccttgctttgatcctgtataaaagctttctgtcttaaaaatgttgcatttacttatcctccactcttgtgcaatacacacacacacacacacaaacacacacacacacacacacacacacgtttgagtgtgtgtgtgtgtgtgcacctgcaagtgcacaggcgccatggtgtttgcacggcagtcagaggacaatttgcacaagctttgcacaagctgctttttctccttctacctcatgggtttcaggtctgaacttggatttgggggcaagtgctttacccactgagctacctcacccccactgcaaaaaaccatttactaatgaccgtgattgaatgaatctttgcaggctcatctatagctccataaataacaaaaccaaagtaaggttcccttctaggctctgtgataaacacaggggttgtaccaagcagagaccatccctgctccctggtctcttatctttatacagcttcccaaggtgtgtcttgaattataattctatattgaaaaccaagaggttgaagttgcggtatttcctcaacaacgtgttagcttctagagatcaaagcactgactggtgattatcttccaaagcctcatccttttatagcacatgacgtatcactcacattttatatctgccttggcagtaataagtttaggatgtgaaatgcgctcggtgcagtttggcagggtgggggtgggggtgtgcatttgtgtactgcatccccaaaggccaatctgctttatgtactttgtgataaaagtgagtgttgatatctaggaacaggacaatgaaagctaatggggcattagaactttcttggtgacctcatgaagcaatttatgatccttttatcaccccttgtatgatattgtcataaaaatgatcttttaattaaatgtagcaggaaaactctacaccctggtgcaaagtgctcctggctggtgagctcacaatgtctttagacagcaacagttttcacagactctcacacacttgcaaagctatggtctctgtagttccgtgcacctgagggtcagagaatgcagccagtaagacttccttccccagaaacacagtcttatgacatcaacataagctgggcttagaagcaaagtagttaattatggttaattacttaattaagtcctactgtgtgctacacattctgtgaggaatgggagaaaacaataattggatcagatagtttctgtcttaaactcaaagtatgcaaacataaaaaaaaagaaaaaaaaaaaacaagggagaaaagtcaaagagaatctagggaaagtggtacaaaccacccacccctgtagagtttggagattccgattgctaccggagggtccatgctttttcagagaaatactaggaaggtaaaatcatcccagaaagaggagccagactgggctagaccaaagtgcccactcaactctaggaaatgaaaattcagaccttgtctttgtcatggtttgtaaaaacgaggtttttcttccacgtgatcagcatcagcctgtacacttgcttatcagagctattttcaccttcacggtctagccccactgaggtgctgccaaatggctggttctgtttctgcagaaacagagagtacacgagtaacatgatggtgcctgagggagggagccctggctccctcacacagcgtcaccctgctccacttgccttgcctatcacgagagggctagaagcattttttaaaattagtgttgattgtcattaacacggggaatctaagggatatttcaattctctcctccactaatgggaggatttgtcattaatgggtctccttagtgaaaagaatcatccttaactcttaagatttaattggagtggccaacaggagccacagtgactgaaaggttgacatggaggtgatgtcagtatagcacagcttagcaggtgaaccgaaatagccttcatggcagctgtgcagaagaaactggctcagggcacaggagggctctctgtaactgcttttgatttttaatggtccttggctggagtgagactattgagaaaaaatcccatgtttatttaactgatcatttccattgactcctataccaacccttttgctagggcagcaatcaagtaaaattagcctatttgtatctctttctctctccaataactgtaaattggcctggttggatggctcaggggtaaaggctcttgtcctgaagcctcacgacctgacttagaaccctgggaccacgtggtggaagaagagaactgactaccggaagttgtcctctgagctccacacatgtactgtggtcacccctgcctcacacctcacaccaacaggcaacaaaataagtaaataaaagtgtaaaaaaaaaaaaagaggcctattaagtagtttagaatgctacatagtttgaaatatgattccatctatatcttctctgatggttaagttcatgtcaagttgcttgggcagagggtgcccagacagctggtaaaagatgatttacccatatacctgtacaggtttggcagaagacaattagggtcagtaggatgagggaagattgacctctataataaggatacacaccacacagcttagcaagggccagcataagactaaaaggcagagagagcaaacctctctactgagcagaggtattcattttcttgtctttgaacttttgtctttcttattctcaagccattgaagaccacgacttatacatttggttccactaactcttgggcctttgtatttgggctagaaacatactattgttttttgttattgttttgttttgtttttaatctccagcttgcagattgggagcctccttagccctaataatttttttttttttttcgagacagggtttctttgtgtaggtttggagcctatcctggccctcactctggagaccaggctggccttgaactcacagagatccgcctgcctctgcctcctgagtgctgggattaaaggcatgtgccaccaacgcccggtgttagccctaataataaatgccaacatgtaaataatatatgcatgggtctatttttctggaaagttctgatgtcagcaagctaccaagcagacatacacttcatttgtttgtggtgagaatcaaagccagaacttcttgcatttctgagtggtcattctaccattaatttccaccctcagccctcactggtaattcttctcattatcccatgccttcccgaagcccagatgtatgctccatcagccatattcccattggcttgtggtaattgtttgattgccagcctctttactgtgtgctacataatttgtgtgttcccacatggattgtgcagaacttaccgtgaatgaattaatgaggaacttgaaaacttctacctctataatgtagaatgaggtgtgatttttccacacctttcctgactcgggatggatttcctgtgacactttattgcatactatcaatcttgcttctactttacattttctccaagaatatgtgaaaggcagctaataaggctgtcttattgattgaaattacatatacttgtttttaacatagttacttttacagtgtatattaacaaactccatggtatcttggaggtagacaagatgtttgtttttatctcattatttctctaatattccttcctcttgccattgaccacactgtgcttaacaccagtttactttagctaatctcatgtcttcctataaaacatctaataaaaaggaatggacagagtgaaacttaagaggcagaggctgttgccaccatttgaaactgtctgatccattatcttgagacaaaagttgatatttttaaactcaatttttagtttcaacactagataattataccaggaaaaaatgtaattttcaggactaatcgagttggctcaggtgaaagcccttgctacaaaacctgctcatgagttccagcctcaggatccatgtggtaggatcaaaacaatcctacaaactgtcctctggcctccacatgtgtgtcatggcgtgcacaaagatgtgataaaagcctgacaaattaaagagtaataacatgatattcgtaatggaaaagcagtgacatggagactgacactctctaggcttctgaggtccttctctttcctatttatatgtgtaggtatgtatttgtatatggttgtatacatatggttgtaaatttgcatatggttgtaaatttaatgaaaattttcatttttctcttttggagtatttatctgtcaaacattcagtggggtcttggacacctttctatgagtctgtgcataccttcgtccctaagtgtttgcatattattccataacacagctgtgtggaagggccgtggagtgtacatgagcctcggtatttatgtgttcatgtgaacttgcacatgtgtatgtatggagggcagagattgacatcaggtggcttccctcagtcagttttcatcttcttgtatttctcaacagggtccctcacagaacctggtgatcatcaattaagcttgtctggttgaacgatatgctccaataactctacctccccagtgttggtatgacagatgtgagcaaccatgcccattttgatttgttttttaaagtaggtgctgggaatccaaacttaggtcctcatgtttgcccggaagacactttcctggctgaatgctgtcccattcccctgtaatgtggccatctaatgtcttgctagtcattcttctcttagtagatactatttttttctgttctatttgtggctgcaaatagttctgagtgctaatatctgcctgcatacctcctggcgtgtgtgtggatctatgtttcactgaaagccatgagagaaaagaggagtttctatgcctcagcatttcgatgtaggaaaatataaatttatgtttggaataagagtataatcacatactgtaaaatacagaaattttaaaggggcagttaatctcagtgtcatttatctagttgaatgtaagtaaaatggcgttgccttctctcggtggttttgcttgtttaggtcaatgatgaaatgatcagattttcatttatgtgttgaagtagttacttccttcattgttggaaccaaatgatggataagaagctgcttatgggaggaagggcttatttgggctcacagtttgagggggttcaattcatcatggaggagaaagcatgggaacaggtagctccatggtgacagaggtgtgtggctgagactcttctccttgcttttgggcagcaagacacaaatagtgggcaggaaggcatccaggctttaaatttgagacctacccagaaactcggcttccttcactaaaacaccaccttctatgggttgcatattctcaaaaacaactactaccaagtagggcccacacattcaaacacatgacctgtggggccatttaaatgcccaaactatggcattagtatttttttttatgtgaaaaggtgtctatttacaagcatacttacaaaatcacagacagttcgctaaattatgttcacaagattcatcaactgctaataccatgttggcattctcctggtccccattttatgaaagatggaaaagcctgtacatggctacaatttctgaactctgggatcctgggaagtaaagcaatctagaagcagagctggtagtcttttgcagcatagcttgtggaagtgtaatttatgtaaataataatccactcattttaaatgtcagtctcaggagagttaacaagttacagtcaccaaaatcaacacatggcatttcccaggacagatgtggcacctaatatctgtaatcccaacactaagcacctagtacttgtaatcccagaactaagaagctaagtcaggaggattgccaccagtttgccgactagccagacaaagatactgtctcaaacaaaacaaaacaaaacaaatcacccagaatatcttcatcatcacccaaatttctctcttctccctgtcaatagacacctctccacctatggcttccagctctctttctgtgaaaatcattttacttatttgagaaaaatgttgtaaagcacagtatcttctataattttttttcacgaagagcaatactttgagggttcaaaaagattgctgtgtgtgttagcagcttgccctttctaatttctggctggtgttgtgtggcttcccagagttttcgtgcggccttgctggcttatactcactggggctatcttcagcctttgctatttgaaggaaactgctctgtagtcatgtacaactttttgtgtgagacatatgcttccattcttcttggttcattaatctctggtggaattatttgattaaaggtaaataaatactcaactctctaaaaatctgccgaactcatttcagtgtgcctgtaccattgtacaggtaaccagtaagctgtaggatctgcttgctgcttatcctccaacacttggtgtcatcagcctttgtatcccttttaatgaatagatgtcctgcactgtgatgttaaactcaactgtttaatctgatgggatctaagatcacctgggaggtgggcctgtcaggattatcttgattaggttagctgaggtgagaagacctgtccactgtgggtggtaccattccttgggctgggattctgggctgtgtaaaaaggagactgcaagatgaaaataagaactcagcatcctctgctttggggctgtttgcagtatgaccaggtcctgatgccaggacgtccccaactgtgatgactgtgccctcaaaccgtgagctaactaaaccccttccacttgtagcctattttgccactgtagtctactacagcaacatgaaaaaaataaataaaagggttagtttaaaattgtattcccctaactaatattgagaaaattagtcgttatgactaccaatgagagtgaattttacagaatactgaacacttacatattctttcctgagatgtatgttcagctcttgtcatttgcctacttaaaatcaagtggttcaaacaattctttaggtgttcccattctgttctccccttggttggagggacctgtatttaagccagccagatgtcaggttagaaaacaaaaacctgactaaatctgtttcggcttgtcttcctatctccacatggaagtggccatgctggagtcaccttccacttgctccttggctcaccaagagagtgggacgacacaggttatctaattgagttagggacaatttgtggccatgtgtagttgaacctttgattctatgggattcttttgatgtattgtgatcttgtttttcttctctgtgatgacatcatatcctgtgattaagaggctatgtgcaatgagaaggttctagcaggcccatctggttctaacactaaacacacacacacacacactctctctctctctctctctctctctctctctctctctctctctctctctctcacaaaaatctatttagtgtttgacaactcctcttgagcaaggtgtctgctctgaagtgtggctgatacactcagtgttgctctatcagagaaaacagatttccttttgccagcagctattgagtgcagattgtgtcttggttaggggagagactttgtgctcatttttcttgctccatggcaaggtcttgtgtggcttgtacttgtgcaggtcttgtgcacgctgtccctgtctccatgaatccatatgtataacagtcctgctgtgtctggaacatgcaatttccttgaagttatccaccacctctgactctcaacaatgtttcaactcttcttctacacagatccctgagacttaaggaggcaggggggagacagtgataaagacatcccatttaaggctgggtgcttcaaaatctctcactctctgcacactgtccagttgtgggtctctgggttgattccatctatgacaagaagcttcagtcatgagggttgagtgacactttcaacttatttgtatagcagtatgtcatcaggtgtcacttcacttatttatttagcagaataatagtaggttttcctctacagcctgcgatctatctcagtctcaggttcttttccactttagcagtgtcagatatggaggtcgatctcatgaaatcagcctcaaatgcaatcagaaagtggttggtcactcccctagtatctgtgacactgttgatacttcaatatccatttccctcttggcaccacgcatggaagtatggcctcctgtcctttctatgtttctcttatcttccccccagacttctgaatctattttttattgttgttccaagcaatttaagatgaataatttatgagagtacatgtgttcaacccagagcttggcaagatttctaggaagcagataagaaacactatgggaatccacacaccaggccagttcctcgaagactgatgcctggaaaacccacagaccatggatacctgctgaccagggtccctcaagcatgtgtccctacatgcatgtccccatgcacactaccttcaggtgtctatcacatgagcctagccacttctctgggaggtgaccatacatcccagtttcttcagaaatgtcttcatgttgtcattgataagttttcatcatgtaccttttactatcaacgtgggctagggttgaaaataattctctttgagaatagtttctaaatgaaaatagaagtacaaatgcatgagcacaacacacacacacacacacacacacacacacacacacacacacacacacacacacatgaaagtagccaatttggttcttataaaattcaaaaccagtttttgtgtgaaaaaattctaatttggctttatgcttagtgtctcttcctctgtagtctgtgggtttgctcttctcatgaagaccactgtgggggctccaatgaagctttggttcccattggtggtgctgtagaggtggagccttgggcaggtgggctttgaggttttatagcacacccccacttccactctctgctccttgtgtatagatgaaatgtgacttttgtgcttcctgcctggcaggctggcctcttctatgccttcccctccaccatagactgtatctcctctagaactatgagccaaaagagacccctttctcatctgagttgcttttggtcatggcatttttatctcagtcacagacaagtaactaacacagctagccaccaataagtatttctgtccttacacagtgaaatcaccaagtgatgaatcccaaaacaaaagagtatacccataatgtctgttaagtgaacccgctttccagtgttactgtgttagttggtattagaaatgcagggacatgatctaggatgctaaagacacttaggggccttttaaagggatgagagggaggggaaggggtagaagaagaaaggggagggcaggggaagggaaggtgagtctctatggagggaactgtgagttcaaagctgagacccagagaggaacgaggtgcgactgcctacagggaaactcccccaggtagcaggaataaacgatcacgttaataatcaggggccaagcgagaggtaagagctctgaagtgaactgattattctctttcccacctgcaagtagagccccaaatgttacaggaataaattcttcctggagaacgtgcatgaaggcagaggacctacctacctggtcagggaccagacactgatttctatgagtgatggcctctagaacagctttattcattaatgtgtttccaatgttagggagtgagtgcagagccttacacactaggtgtgtgactgagcattgggtgtacttctgtgcaatctgtgagtgcatgctgtattctaggcactgtactggggagcaaatgtaaaacagttggaggaaaactgcccataaggaagataaccaagaaaaccactctactgaaatacatgtttgtttgtttagcaagaattggtcactatccttggtactgggacaaaagatagtgagtctacccttgtcagctaaagttcctaaatagaatctacgttagattctgactatgtagcacaatgttttactatttggtgaaagtgtccattttttaagagtgcccccatctccaattattcattcattgcttcccctaagtgccatcacttaagaagattctgcacagtatttcaacatgaggttaattgcagctaaagaaaagtttatgattagtccagacaggtatttttcttcattgtctaataccataaatccattaaattccgatccatcttgtcaccctctccttgaagacttggttatatgacccacagtactagttggatttcgtgactgtaattgtgattggcagagagctttcagtgtcgcaataaattagccacaagcagagagggacttcgtaccacccccactccacatcagaatctgaatttttaactaccctattactggcaaatagcctcatttggaagaaagaattgaagaaaaggatgtgcctcttcttagggtagaaaaaatgctttagaacactttagagtaacatagcattattcttttatatattcgatgtgtttaaaacactaacgtgtctagcttacagcaagggattgccaagccctggtcccaagatagtgacacaaacatccgtttactcacaagctttgcagggtggaggggatatgcagatgagttctggctttgataattgcagcgatttgccttgggaaagaaggtctgaggctgttgccacctcttatgtctattccttaccttggaaggttacccctgtctgtaacctctgaaactgtgcaggctgttttcatggcctgcagacaagcctggaaaacagaagccatgaggaagctcttgtcaatgggaggggacaacacctattcctctgctctgcttttgcttttactctttaaagagaagagagctcaaggactctccggtgtgcatgtatgcacacgtatacacacacatgcacacatacacacatgcacacatgcacacatgcacacatgcacacatgcatacacacacccacacacatgcacacacacacacacacacacacacacatacatgcacacatgcacacacacgtacatgcacacacacaatcactccaccgccactgactgacacccttatgaaaagctgtgtgtgtgtttacacaagagtgtatatacttgtgtgtataaaagcccaaagcccatgatacatgtgttcttccttgaattttcagttgttggcatgctggaagaattgaggacgtaaattatttctgccctgggcactttcactcgaatggccagcacttattcagctggtcaccataggtcttcctgtccttgtccacagtccatgggtaatattttttaacatggatgagcagctcttcaaaaccttcccaatgtattaagcataaacaagccattctcagcatccagcttacatgtctttccttcatatttatttctccacaacaaacatatttattggggccattatgagaaaaatctcccctctccataaatgtttgtcttctcctctgtcccttttataggatcatgaagaaatgatagagggtctcggtgtgtgtgtgtgtgtgtgtgtgtgtgtgtgtgtgtgtgtgtgtgtgttttcctcccctgagaatttccttcagtgagttatgccattgaatgctctttacaagccaagaccctagtttttaacagtttgaagtaaaaaatggacttggagaaaaacaggtaaaaggtaggacacataaagtcattgaagaagggcatattttctgcactgatatttgcaagttaccccttcacacatcacaccactggtgtcactaaagtgtacttaggatctacttttggtttttgtttttaacagtgcatcttccatccaaatggctacctaagagcagtttaaatcataacatccagataaatgaagtcttgcgtgttggctaaattttcaagctatgtatgggctgtccatcagccaataaaaaactagtagtgttttctgttaatcaccaagggcagttgtctttgctatggggtaatattgaacagatagcttgatggctgtaatcctcagcttgaacgccattagtgaaaacagctatcattaggattctgtgggatctgggtgacagctgggcaatgtgagaaccaatgttccacgtatgtgcatttggacactgcgggaggctggactgccattttcctagtgttcaatgctcaccggcaactaccgcggagccaggttgtgagacaagaaatgtcgagttcatatgtgacttctcaccattccctgttggactgttagagagctgcacagctggagctggagaatgaaaacccatcacatggctgctattaactaggtgtatacggggcacactgccccacaaaggcttctctttatacctacaccaggctcacgctcctcatagacaggctgagggtgctttgggaagacgttgctcagaaagccaatgacctgactaaccctagtgctggcagccatggtgaacaccagggactggatgacccacttacatagtcaaagcaaggctgagggaagagggcaaccaaggtcagtcctgggccccagttgctgctgctgctgttcgggggcagatctctttctaggacaatttaatgtgtctatttttaacgctctgacttttaatgtaaactgttgtatttgaacacactagatctgatagtaaggcctaaagagttcctctagtatagggctgtatataaatgtattatataaacatataaaatatatttacatcagattcattttggtacatgtgtgcttttttttccgctcagacacatttttctgtctccttgcacatgcagcactttttattatatgttgggtagtatgagcaatacagtgtaatctgaatgacagtccagagagagctttgcatcctgtgtgtctatttctgttttgtcagaattgttctcttcagtttggaatatagtcttatcatgggcatcctatccctaggtttgattctaatgtctacattgcactcctttatggttttgactggatgcccagctgagctcattgagtcctttctcctcagaccttactaggggttcagtgtgttctccaaacagtatggcctttatctcataggagaaagtccctcctgggtttgccagtgttcagccaaggagatggagaagatccatcctcagatgtgtgagccccccctctgggtatgtctgttcctgtcccattcacctcctctttgcacttgcaagtgcagtgagtgacactgtgtaggcacctgcataggctaaagggtgatgtcaggcatccctctctatcacttcctgccttttgagtctcgcactgaacttggagctgtgctggcagccaatgaaccccaccattctgtctgcactccctacagcatagagctgtgactgtagacatacataaccacagccacattttcttacatgggctgggaattaaatctcaggtcctcaggtttgtgcaggtttctactgtttatcagtagaaccctttccccagccaatttattttttattgcaccctggacatgaagaaaaggaacataagcaaacaccaggctcagtgagagatgctgcctcaaaaattaaggtagaaagacataaaaagggttattgatattgacctctagcctccacacacgtgcatacatgcacactcacacatacagttatactcacacacaaacatacacatagttccatagcaaaagtttaaaaaaaaaaaaactccctggaaccacatcaaatttgttctaagaaagactgaatgctgtatgtgcatgtgactggggcaacccagtgatcagaggtaggtaaaagtttgcatgagcaaatgagctcagaggccattatgtcaaggctgtactgtgatcacatagagaaagagaactacacacacagggctttaaagagaagggtccttggtgccgccatgctcatatagcagtatgtcttttgtgacactgtaaacggtatggaaacaatgtttggaaacccattgaaagttctatttttgtatgttagagacaagcatgttttttatgaagagccacctgaatttgagggtgtgaacagtggccaccaggttatccaaatccgtttcctaaagcatagatgacttcattcatccagctgaacatttagtcttgtctctggctcttggggtaacctagtattttcagagttccttctctaggaataaaagtccagctaggctccagatatcaagggtgttcttactatgggctaaccaaggtaaggatacccaagatgatcacacggtaaagtggaccatgatggagggattaaaatgacaaagaggagaagctggagagatggctcagtgtttaagagtactggttgctcttgtagcagacccaggttcaattctcactgcccacatggtggctctcaatcatctgtaactctagtcccaaaggacctgatgtcctcttccaacctccatggaaactaggaacatatggtgcacctacatacatgcagacaaaacattcacacacataaagtaataaaataaatacatctaaaatatgcttaatgcagaagggcagggctggatcataaaggagacaaatatatgaggaacagatactctggcttcaatgacgtggagaagcaaggtcttagatggtcattttctcactattttcagcatgtgatacacagatatgcttagttggcttaaggacaagacagcagcaatgtctgagatcctcactgtcatccttgatgtcagattggtccctggcctctgtatctttagtgggataactggtacttcatctgcttccaccctacccagtcacttttgtcttggtaccagggtcttcagcctctccatctcaattgtgtatgtggtcttgcccccttaaataattgcctggacctaagcttgttgcctgcatccacaatgatcggacagaatgaacttcctgccacacgatgatgctttcagatattttctcactggtattagaactagggttgagtaggtacctatcattgaatgtggattctaggtagcagacaggtgcctctgagaaatctgtcttacctaactgtaactcatgcgagaatcctaagagtcagatatttacccatcaaagcataagttcccacaggacattagtccctatcaatcctttgccctttggttacaacagaggatctggggaatatgttatagaggaaaagaaaaaaaaagaaaatatattggtcatataatgttaatattatggaggaagtggtaaagattcccagaagatgactgtactgttttgcccaagactgatactcaatattctagttaatttgacttcagcaatcaatgccaaaaatcaagtaactgtgcaaagctagtttcaggcaatactcagaatgaaataatgaaataaatgctctctcctctgtcagatgattattctgaaaacattattgaaggtgatgtctcttactccaccatcccccactgctgcctaccccgtccaacccgcagcacacccgtttttatttattctgcacccatgaagaccctcttctgctctggtattttgatgtgccatccccagtgaggtttcagtgtttccttttggatttccatattttacatcccatcacattgcttggagatgtagataccaaaaaatgaataaaccctcatcaacaaattctaggttagtggactggaaaattattataatagaagtcaaggcacttgggttcatttgccagttaacttaaatatttttgagctttgtatatggagaaattggaactgaagtttgtagacagtgactattttgactcgagtgtaaaatctgctcctgggttttatataactacctatttctaacaattatctaacaattctgaaaataaaatgcatttgacactccaaatacactgtgttttctgtcactgtaacaaaatgcctgagacacacaactgaaaggaggaaggacttgaatttcagcagactgtagtcagatggctccatcatcctgggccccagggaagacagagcatcatcacagcttcagatgactccatcatcccgagacccagggaaggcagagcatcatcacaacttcagatgactccatcatcctgagagacagggaagatagagcatcatcacagcttcagatggctccatcatcccgagacccagggaaggcagagcatcatcacagcttcagatggctccatcatcccgagacccaggaaagacagagcatcatcacaggttcagacgatttcatcatcccgagacccagggaagacagagcatcatcacagcttcagatggctccatcatcccgagacccagggaaggcagagcatcatcacagcttcacatggctccatcatcctgagagccagggaagatagagcatcatcacagccagaggctgtggtagacgaagctgctcactctagggaggccagcaagaagagagagtggtgacaggcagtgtgaagtacaagaacagtccccaggggcatgctcccaaggacccgtttcccgtaactcggtgccacacatggccttctgagacattttcgatccaaaccatgccatactcatcttctctctagtctctgttgtttgcatccttgttctctgtggctccctgcccctaacagtttgttctctccctactttttcccatattaatatacattgtaaaactgtagttgtagtatctggtaaagtcctcatctcctaaaactggattacaaacccctcaccagctcccatacacatctgttcttgaatctaagacacaacatgcttgttgtaacatcactgcctacttacctgcccagctcgtcaataagctgtccctctttctgtttatgctttcccattaacgcccctttgactagtgcccatctccacagcacagcaggggctcaacagcgttcggccacatggcaacatcatacaccattaatcaaatcttgctacctttatttctctgttaatcttagtatttagagcaatgttcctcaacctagtgctgtaaccctttagtacagttcctcatgttttggtgaccactccccaaccataaaattatttcaatacttcataactataattttgtgactgtaatgaattgtaatgtaaatacctgatatgcaaggcatctgatatgtgacccctgtgaaatgaccgtatgacccccaacctgtgacccctgtgaaatgaccgtatgacccccaacctgtgacccctgtgaaatgaccgtatgaccccaacccagttgcaacccacagggagagagccactgatagaccatcttgctccaacctcagcatcaatgcctgttgtaatgttcatggattttttccagagcatcacaaaagattaaggcaaatggggcaatactctcatgggtcctcatccctaaacaaagaactgagagaaatagccttccccaggaaagagcacataaattggttatttaataccaaatagtcagccctaaaaacatatttgtagaagtaacattatatgaatacatatttatatcaaatatatgttctaaaatatgcaaatataatagtaacaaaatacacacacacacacacacacacacacacacacacacacacacttttatattgccctgataaaacaccataaacaaagaaacttataaaagaaagtatttactttggggctagtggttctgaagggttaaagttcctgatcatcatggcactaggaaggcaggcagggcactggagcagcagctgagagtgtgcatctgagagtgtgcatctgagagtgtgcatctgagagtgtgcatctgagagtgtgcatctgagagtgtgcatctgagagtgtgcatctgagagtgtgcatctgagagtgcgcatctgagagagtgcatctgagagtgtctatctgagagtgtgcatctgagagtgtgcatctgagagtgtgcatctgagagagtgcatctgagagagtgcatctgagagtgtctatctgagagtgtgcatctgagagtgtgcatctgagagtgtgcatctgagagtgtgcatctgagagtgtgcatctgagagtgtgcatctgagagtgtgcatctgagagtgtgcatctgagagtgtgcatctgagagtgtgcatctgagagtgtgcatctgagtgtgtgtatctgagagtgcgcatctgagagtgcgcatctgagagtgcgcatctgagagtgtgcatctgagagtgtgcatctgagagtgtgcatctgagagtgtgcatctgagagtgcgcatctgagagtgcgcatctgagagtgtgcatctgagagtgcgcatctgagagtgcgcatctgagagtgtgcatctgagtgtgtatctgagagtgcgcatctgagagtgtgcatctgagagtgtgcatctgagagtgtgcatctgagagtgcgcatctgagagtgcgcatctgagagtgtgcatctgagtgtgtatctgagagtgcgcatctgagagtgtgcatctgagagtgtgcatctgagagtgtgcatctgagtgtgtatctgagagtgcgcatctgagtgtgcgcatctgagagtgcgcatctgagagtgcgcatctgagagtgcgcatctgagagtgcgcatctgagagtgtgcatctgagagtgcatctgagagtgtgcatctgagagtgtgcatctgagagtgcgcatctgagagtgcgcatctgagagtgcgcatctgagtgtgcatctgagagtgtgtatctgagagtgtgtatctgagagtgtgtatctgagagtgtgtatctgagagtgcgcatctgagagtgcgcatctgagagtgtgcatctgagagtgcatctgagagtgcgcatctgagagtgtgcatctgagagtgcgcatctgagagtgcgcatctgagagtgcgcatctgagtgtgcatctgagagtgtgtatctgagagtgtgtatctgagagtgtgtatctgagagtgtgtatctgagagtgtgcatctgagagtgtgcatctgagagtgcgcacctgagagtgtgcatctgagagtgcgcatctgagagtgcgcatctgagagtgcgcatctgagagtgtgcatctgagagtgcgcatctgagagtgcgcatctgagagtgcgcatctgagtgtgcatctgagagtgtgtatctgagagtgtgtatctgagagtgtgtatctgagagtgtgtatctgagagtgtgcatctgagagtgtgcatctgagagtgcgcatctgagagtgtgcatctgagtgcgcatctgagagtgcgcatctgagagtgtgcatctgagagtgcgcatctgagagtgcgcatctgagagtgtgcatctgagagtgtgcatctgagtgtgtgcatctgagagtgtgcatctgagagtgtgcatctgagtgtgtatctgagagtgtgtatctgagagtgtgtatctgagagtgcacatccgatgcacaagcacaaggcagagagaggactaatggggaacagcacgagctttgaaatctcaaagccacctccagtgacacacctcctccaacaaggaaataccctcctgtttttcccaaacagttccaccaaccggggacccagccttcaaatatcagcctatagagaccattctcattaaaactacagaatatgtcacaataatggaaacaaaggccatgaatttgagagagagcaaggcacttatgtgggaagactggaggcaggaaagagaagggggaatggtgtaattatattttaattaaaacgtaataccacttaaatatttttaaatagaaaattgatttgatgaagcagatcttttgttttgcttttttttttaagacagggtttatctgtattactttggaggctgtactggaactggctctggagacaagggtggcctggaactcacagaaatccacctgcctctgcctcccgagtgctgggattaaaggcgtgcgccaccacccagagaggcagatcttttaaggaagaatttgttccaaaacaacagggaaagtaaataggaaaatatatagacgaaaaccaatgaacatgagtgactatgaaaagaacagcattgtacaaatagcagattggggctaagggtccagctagcagtgactcatattacactgtcacctagaaaagaatatagtagacagatctatctgagtgtcactgtccagagtctggcctggtagaagaataactatccagttaggggctgagagccatagagaacaatgcatgcaaacaacaggtggcatctatccctgaagagggtggctcttacattgatttcccagagagttcttttagattggagtggatctttcagcatacagtcagatctacattcacagagattaggatgaatcaagggcttgtccagggtcaggatctccaggcaaacatgctgaggttcaggataagaatcttaagaaaacaaagcacaaactcaaaaaaaaatccaaaaaccgatctgtaaggtcagtccccagggtgaagggcaggggtggaagctctcaccccaatgatgtcactgtgcagaaggcatcagtcaaaggcaaatctcccaagaaaagttcattttgtgagaacaagtataacaggaccctgaaagggaccttttctcgtaagctctaagattgcacacaaatgggatttaagatcaaattattttgcagcaagtggtctgtgaccagggagcatacagaggaaggatggggcagttgttgaatagattggctttcgccttggaaggaggtcattctctcaccacctaaaaatcaagatggtttcaatgcatcagctctcgggatgcccgtgagctaacaagcaccacaggtacaaaactccacatgattactgccatgaaaatctcagtcaagatgatgaagacaagttcataaatgatgtaactgtttgccttttatttttatcatttatgtatgtttttgtatgttcttgtgtgcttgtctgtagatagagaccagagatcagcatcaatgtgttccttaatcatggtctgtttgtcttaccttctgagacagggtctcccactgaacctggaacttgatgatttggctagattcgactcccagcctgaaaacctcagagatcttttgtccctgccagccatctgccgcaattacaagcatgcacccctgcacatggctttcatgtgggctctgggagttgaactcaggtgtctgtgcttgggatgcaagcactttactgacccaactatctccccagctccttgtttttctttgaagtcttggttgccaagatctaatgcttttttcaaattttttatttgaattagaaacaagattgttttacatatcaatctcagtttcctctccctcccctcctcccctaccatcccccccaactacaaccctacctgtcacatatcctttctgctccccagggagggtgaggccttccatagggagatcttcatagtcttccatatcctttggaatagggcctagtcccaccccagtgtgtcttggttcagggagtatccatctatgtggaatgggctcccaaagttcacacctatgctagggataagtcccgaactactacaggaggccacataggtttccgaggtctcctcactgacacccacattcctggggtctgcataagtcccatgctggtttcccagctatcagtgtagggaccaagattgttcaggtcagctgtttgtgtgggtttcaccagcctgttctggacccctttgctcatcacttgtccttctctgcaactggattctagttcagttcagttcagtaattagctgtgggtatctgcttctaattccaccagctgctggatgaaggctataggatggcatataagtcagtcatcaatctcattatcaggggatggcatttaaggtagcctctccactgttgcttagattgttagttggtgtcatctttgttgatctccagacatttccctagagcctgatttctctttaaacctaaactgtctccctctattatggtatctcttatcttgctctctactattcttcccctgactcaacctttctgctccctcatgtcctcttcaccactcctcttctccccttcttattctcctagctccctcccccctccctccatgctcccaatttgctcaggaaatcctgtccctttccccttctccaggggaccatgtatgtctcctaatgctttcttattaactcactgcttcagtgggaatcctgctcctgtttgggctataagaacactcctctgcctcttcatgtctattttattttatagcaagcttcatggggaccagtctctgtcctggaagaactaatattgtcttttcataccatgtgggaccatacagaccagcagctcttgtctttcagcttcttttcatgatgtggctgtatctctgctatctgagagtagttaggcaacactctgactccagtgcaaacactttaacttagggctttgccacacatcctacccattgggttgtcaacaaatgctatcaccacaactggacatttctcagtggcacatatcaataaaatgttactatgaagccaattgacactgtggtgtcaaaggcattttattctccagggacatagatgaatacatttaaaatacacattttcaatcactggattttttaaatagctagttttctggagaagaaaggaaatacatctttctctggatacacaccctttctcttctgcttgagtctgcctcgctattgacatgacttctctatccagatgcatattggtagttgattttctttctcttaaaacattgtacttggtgttcctttctgttggcaagggtagctttgtctggaaagagttcctctgtaagcagaagtacatctccccaacttcaactcttctgagaatccttgaggcctccactgtattataatggtgtttgtgaagagaattggtttgtttgaaaattggacaaatagtttaggaaccaatggaatgcattccaagtattgggaatgagtctgattgaaataaatgatggtattaatgtaaaagtctatttttattcagtaaaaacaattaagttaattaacaagcaaaaattgagttgacatggtagattcaaaactaatgacagtaagaacaaagcttttatctaatttcaaatcaatgacattaatcgtttctaaacccattatttctgaactcaatactttttaaaaattaacttcaaaatttttaagtcataaataaatcttttctgtttttaagcaataaagaaagtttctgtactttggtaggtcatgaccctcaatttgaaaatgagccattttctgcaaagttgtagtacactggtcttccttttgagccatggcattttagctcctgtttcctttgttgctcataatatctggtgcaatgaaatcccgacacaaagatcaattggctggtccttcccaggctttgctaacatagtttacctgcatttatttatagttttctggaagctgtgataagaaaggcttggggcctaaaggcatggtgcacaggtgggaagggataaattaaaaataaatgtctggaaactataaacatgagtgatttgcatagattaaacataggtaaagatcaagcgtggtgatatgttgcttatgatttattaaagccactggagatcaaaatagcaaagcagccatactagctagctacagaagccaggcacacacctttaatcccaggactcaggattaagaggcagacagatccctgagtccaagaccaccctgggctacgggacaatgaatcagagctcacaccattaatcccaggatttgtgatgtataaaaggtagaggcattcagtctgagagtttatctctagccacgttgtggagagcatagcagtctgagtgaatctgaggggcagtgaagtctggagcagcttgaggatcggccctttggtctgagctgaggtagaggtaggaactagtggcccgctgctttgtttctctcattttcagcttggagcttaacccgcagtatctgtgtctgggtcttttatttatcatgctacaatcaggtgcatatgtagtcttttcacttttacctaagggtttcttgagtaaggatctctccaggagtgttcagcacggttccggaggtctgcaattaccttgaaccccagtgcagacagaggcttggatttagagagaggagcgctggatgtccagacgtctccatgcctctttttccgtaggtttttccgtagaaggtcacatgattagaaatcatcatgttggctgattatttgtaacaatggtgaaatacaactacttattacaagatttattaaagcaagcaaaagagttttttaaaatgtttgctagtatgaattaattgtataaaataatgggattcaaaaggacatttcatgtttataatgtgtttggttcgtatcaactctcccattgcccttagaatctttcctctttacaactcacatccttctattttcatcctctctctctctctctctctctctctctctctctctctctctctctctctctttctgatcataatggtaggcatgattgcagggcttacaggaaagagtccttagctcctctgagagagagagagagagagagagagagagagagagagagagagagagagagagagagagagatctaagaggagaagtcaggccagaaagagattgcctgaactaattcttctcagggacaaagaagggtctgtatgatgtacatagagagaataagttgacattggtcctacaaaaagggtgaggcaatcagggcccggtgatgaggctaggagaggagggagaagattccagagagcctggcctagacagtaggcactggcaggcaacagaacgtgtggtcagtgacagggcccaggcttagtagcaaggagtttgaagctagggagctgtaacagtctagaaaatgtctgtgaaagctaaagtctctatgagataggaaggcaggacctggtgggacagttcagggagagtttgggatagcttgagggtggggtatttgatttttaagtctggtatgaaatagcttaggactggaagaaagttcagtacagccatgactaaaagcatcttgaagggcctggaagtgagcattgctcatactaagagagcccagccactccagttttctatggcacatacacatggcatactgggagttttaagaatagtagaggaaaactgcaagatggaccccaggttaagcaatgaatgggagaccccagtgtggacagtttcaagaaggagcaagggacagtcagcttaactatacaaacaggacttaaattactctctgtgcaagtttctgggcaaagcacagagccccagacatctcaaggcccctgagactttttggagcctctattcaccagcaaaagatacatctccaatatccctccagttacatgtgtctgcaaagttcctgagaactaaaataattcacttcctctcaagtaggaacccctcttacttacagacacaattagaaggatcttgagtatttattgaggttttatggagggcactagctggctttcacggtgggcactctcttctcaaatctgtatggtcactcttctagccatgggggtttcacttccacataaaaccactatttttattaagcattgttgttttgtgtgaatacagggttgcaaaaaatattattactgctgtattctatcatcctcaaacatcttttgaggcataaataagtgcctttcccaacagcttactgacaatgcagtcgatagagcactggcagaactgaggctaaatactgcccaagagatgaggaaaagctgggatcttcctccccactctacacagcaacacaaggggcccgggtagtgttcttttctaattctgattgacttaaaggcagatcaagtctcattgtcttgctgagtctttcaggaccaacttaaaaactaactgtagatttattatttttttttaaggaatcttaagccacagccttgagtctgagagagaaggtacatttttattatgtatatttgtacttagaattacatatgtctagatttatttttaaatgaagactattaaaaaatagaatgatcataaaggcagactgtttcccaagtagaattagccctccatatctgaatgaggtaagatcgcaatcgtggcagcctatttcacaagttgaacaggtagagttagaactccatacctgaaggtgataagattgcaatagtggacacctatcaatgggctacaaatagcacttcatatccattcataaaatccaaccttcaggtttttccactagcacatataatattaatatgtgtttttttgtaaactggtacctccctatttcagagatgcctctgagtgaattcatatagatacctgtgatcattagcccatgggatacctatagtcctgtcttcatgaatcatggggaacacttactgcatgattactcaatggagttacctcatatacaattattactaaatataaggatgaagtgaatttttaaaaatagctgcctattactggcagaggtggtttcctactccctaattttcttatttcatttttcccctcaaattgccacttattgacagctgtagtaactctgttattcctcattaagctaccttattgagctggagatctcaccccttcggtgtttgctaatataggtttagaagaatcctcccattctgattggttgccattcagctgggtttaaatgtgatgcacttgttggctgcccagccccatggggacggtgtagagacagactcactcaggcttcctttgaacacagaaatgaaaatcaataaacaatttgaacttcttcgaggagaatttttctcctctaatgaatatacaagcttggttacagcttaattcaaagactgaatttagtgagtgttttacctgcaccataagcatgacaaacagaaatgcctgatgacacatcccacagggagacttaggttttttttttaaatcatactctcccatcccaagccacataaaaatgagaagacagctcaagttatacgtagttgaactagagcattgaattccagtgataggatttgtccatagacagagttttaaaggaaagaaaatacacaggtaattaataacaatgaaaatattatttaaataaaacatctcttatccatgaggactgtgtgtgtgtgagagcgcttacgtgcatgcgtgcgtgcgtgcgtgcgtgcgtgcgtgtgtgtagatgtacacctgtgcacacacttggatgtgaaggagaacatctgcagcattgttctgtcattctcgaccttcttacctgagataaggtttctgactgaacatggagtagtctagcgtccagaaatcctaagtgatcctcctgtctccacccgccatggctatgaggttacaggtatgtgtgtgatcatgcacagctgtttacatgaatttcaactcaggtcttcaaacttgtatagcagggcagagacacatcacataagcctcttcatcaaaacttacagcacccaaatcattccgtttccatctttgaaataagcagtatcaaggctgagatgcctcagtgggtaggaatgcttgcctgtaatctcaggatcataggcaatgacaaactggccttgaacttgttaggcagccaaagagggctttgaagttctggtgtctggcttccatttccttggtgttggattgcaggtgtgcatcaacacactagcttatgtagtgctggagctcaaacccaggtcatcatgcatgctaagcaagcatcctaccaacaaagctacatctccaggccctgactcacttttagaagaaaaaacccatctatctatctatctatctatctatctatctgtcaatcatctatctatccttctgtccatttctctatttactttattgatttgatttgtttccctgtatgtgccagtgtgagtttatatgcaccatgtatctgtggaagtctgcagaggctagaagagggtgtcagagactctgaaactgaagttacaggaagttataagctacctgatgtgggtgctgggaactcaacttgggtcctctggaagagcagcaggtgctttcaactgctgaacccattttttagcctcccccccaactcacatttgacaagttgaatattgtgaaagagatggtagacctccttctgaggtcagaaatggcaatacaactttcttcctctccgttccttgtgttcctctccctgtaagaaaaaccacttgccatgtaatggagacaatcggaaagccatatgcaagtgtccttgagttggagaacaaagctaccctgcctacagccagccagatagagtgaaggccacgttggcccatgtgacacagccccttggaagtagactctcggtccttggaccatgtttcctctgcagcctcagtatatgaattacatttagcctcaggagaaacctaagactggcaccacacaactgagcctttcctacacccagaaccttctaaaatgtgagataatatatatttgttttaagccactaactggggacattttactatgttgctaatttcccattgcttatcaagttgtaaacacttagcatagatcaaccagtgagctgtctaatcaatcattcaaacaaagaagttagttttctgacttaatttccccaagcctatcaaaatcccacacttcctctgcacctcctttatctactgttgctcacactgaccctgtctatcttaactcgtcttccaatttctgattctttccgttggtaacatacactttagcatataatcttgttttaattggcttagatgtgttatatctggcaatcttcccaaaggaaaaggtgcttcatatctgaaatatttaaaaatatttttaaagtcattttttgattcaatatatcttaattaatagaaggagcaatcattccctgaagttgcttgactcccaggaaagctagataaatggctattagctttggaccaaatgctacgtacgctccagttcctgtctgagaggtctgtttctctcatctgtgcctcccatgtctgttatcaggtaaacagacttttctgaaaaagaccagaaattaaatatcttggctttcctgggcatttgaatctactgaacttcacatacggtttagtcacaataaaactttatttacaaaagcaaatgtcaagacagtttgggccctagagtggttatttgcagccacatgcagtagaatgatatttcctaacatttcttcatcagaggaatcagctggagattattttaaaataaacccacccacccacagctgtgctttcagtttacagttggcaaaactcaaagaatcaagtttactgtttccctagtactagggactacttgctgctctcagaactgtgaaagaaagaatgcgctctctctctgtctctctgtctctgtctctctgtctctgtctctctgtctctctgtctctctgtctctctctctctctctctctctctctctctctccctccctccctttcctctcctctcccccttactccttcctatacagcctatgatagtctaaaacttacactgtagctgatgttgccttggactctcttgaataccaggcccctgtgcctacttaaaaaaaaaaaatcatcacctttgttgatagttagggtttccatgctattgcaagaccacaggcctcccccaagactgttgggtttctcagaacacacagctgcacttcttactgtagggaagacaggcaatgggtaagacaaccacttcctgatttccttcatgaaagtccctgtcaccaggaaagcttagggatctaccctttcactctggagcttaaagtattcagtcacttcaattactgttctccacagcacatcaccttcacagaactatcctttctttgcaaaatgaaacatttgaagatacagagacataacatgaaataaagtgtatagaagaaacataacctggaaagatgatgctgtggttaagagcaaatgctgctctttcagaagaccagagtttgattcccagcacccagtggctagtgacctcctgtaactccaactccaatgtaataacacttcctgaactcatatgttcatctccacatccagacacacatacatgtgactaaatagaaaagaaatctctacaaaagaaacacagtgacatttatagatgcaaatgtcagagtaagacccattatttttataccaactaagataattttcatttaaaaaatatgacaaaggtctgaaaaatagaagtggctgattcctgggatgcattaggtgatcaaccacatggtccagctactgaaaacaaggccaaaattgaaactttttcatgagtttcccatatgctcccagtttctgtcctggcagttgactgagctatttagtacattaattttccatcatcgttcactttatcatgagtcattttgttttataatttcaataaaagtgatcaaagaaaagtaaccctgatcgttatcaccagttctccccacgagtcttgggaaagaactatcacgatgtcaagatggagtggggtggttcttgatgacagtaacattttagactaagaggccatctgccagtagactaagtccagtagacagttctaccctgagaaggctaaagttcagcatcaaattgatatgtggtataattgtctttatcttccttgttctcttccatctgccagacacccaacaagactggaaggaagcttatggaaaggaaatcttagccactaacacaataaatgacaggcaccaacctaaaacaaagaattgcctttgtgataaatacgtgatgccagggcttgtgaccacgaggtctatggcttcaacaatgtgttctaccacctgaaattagccagctgctcaaggtgtagctaaagtacagttgaggacacttgtaaggtacagtatcgaatctcggcatacaatacatccactgattctaaggatcaggtatggaattgtgtctccacagtcagaaaacccatgttcataactatagaatgaacaccattggaacaccaactgttaccattgagcttcatggcttaagcctgagttctaacacacaacatgcacactccatcatctagcagagtagctgagttggagttaatgcttaactatctgcgtgttatattttaagctctgctgtaatgagatgaataaatattgattggcttaagtgaaagatggaaccagttcaagtgctgacatgcgtgtgtgtgtaccatttaggaaggaaaaagattgattcagtttacggggactgactgatgtccaatccggtctactcatttcgtgtctgtctcagggaaaactgcaaccaactgcttggcgtgttttcactgtctttagcaaacaccaactgtactcttttattctgttttatttgtgtgtcttgttttcttgaaactgtcatgaaaattccctgcttcaactataagttttgaatctatgaaatttacacacttgaaggttctttatcagccttgttttaaaaatgtttacttctaactggtaaaatatttttcttgtttatgagctgtagtgtcataattaagcacacatatacattgtgatcaaattagggtagttatcatttctatttccccttgatttgtcacttctacagatactgggaaccttaaaccattcttccttagctgccttaagcctgtagtaagttgccatgtagtataatttcactctcatactatgtctcagtagaacaactttctgcctctgatttgttttggatccccttatcgtcctctcactattctccgttctggcttctagtgacctctgccatactcttcaatgtggttagcagcttgaacttcccccaaacagtaagaacatgaatgttgccatccaaggcctgatttatcacacttaacacaatgtcctccatatcaatactggatttccatattcatttttccactggtagacaactctgtggaactttctttgaagctgaggataatattagatcatatggacagtttaacaacattaacttttttaatcaatgagcctaacacgtctttccaattttgtgttctgtataatttcttccatcaatattttattctattcattgcagaagaaacttttccactccctttattaaaatgttcataggtaagtttctttggtagctattttggtgtctttccattttatcatcattgtgtaataatgctactttttgtgtgttgatttgtatcataaaacactaaatttctccatcacttctatcaccttcagagtagtctgcagtttttggcatatgaaattatgtcatctacaaataaagacagtctaacttcctcatttcctgtttggatcctctcacagagttttttttttttttccttgcagaattactctggctgaggcttccaatgctgccagtgaatgtcaatctgcttgttgtattctgcagcttaagagtaagttcattgagattagtctctttggcagagtgtctagggcttattgcacacagcctttactatgctaaaggagaatccttctatacccaagctgtagctcctcgttgcaaaggatgttctgcatcagctgggatggtcacgttttctttgctgtttaacccattgatgggctgtgtcaaatatattgatttgcatacacagggacatccttgcatctcttgtataggccccaattgatcatgatatagattctttcagaatgatgctggattaggtttgatagtgcatgttgaaaattttctatatcttccatgcatacacataccacacatacgtcaaagaactaaaggaaaaagaagaggaggcattcacagtgggtgtgtaacaagcatttagtgcaaaaccacacactagtgagccaattagcaaatcttagagaactttgatatacagttaaagtacaaaaatctgtgtaaacctagacttatctcagtaaggtttgtagatctatattccctaacagtgtaaagccactgctgtattcatggaaaaaattccaccccaaagctggaaggattaatgctgcttctttggtcatgataccaagaaacagtttcatctcttttaaagtaaagccatacactagtctatgtccaaccaacactgctccaggaaacatgtgtttcattcaaagccaaaaagtaattttaatttaatgaacatcttcagtttgctgagtccttcagagactgaaagtctttagggaaagtctaaaactgaactgtaacaatttgttaggcagcatttcctttacagtgaattaaagggccaggaacacttgaccaaaaagtcccaggctttcccagccattgattttattagccaagatcacccctttggtgttgagggaggggaatgtagccattcatcttaaaccttctttgccccttgaccatatagagtttctgtatttccacattgggcctatttgttgaagatgaacctgggaagtggtatgttctgtatcgagatgttgagggaagccagagctctatggggacccatccaggtttacaatgggaatattatgtgatgccacactcgcaagcagtgactaggttggacttcaactcactgtgctttacttacaagctcacacagcaggtctgtttcctctggacttcccaataagtcatcagtagtgtagtgtgtgatgtagatggctatggtagctgttggataggatgaatgggagaaattatacaacatgagtagacataaaaacaatatcaatagtaatgaaattttcttactgaagactggaagtagcttgcaatattttattgcctgtccccaagatgccagcaggcatcatgagatcaataaaatttcctaagattcaatgagccaaacggggctgtctctccagtacattaccctggatcccagggaggctgtggtgctgagccgggggtcctggtatcactaactgccatttacttaagataacaagtgatctgtgaatatcctcattcaagacagacaagaagtgacagcacaatgaagaaatgggatttccttcttgggtatgtaaagtgtgaggtgcctggcatggctgtgacatgccacagtcaacttgaggcttaaagcaacagaaatatattcttccaaggctttggcatgcagaaatctgaaggaggctgtagtaggagaagcctttccctgcctgggtcttccagcttctggggtttggtggctttttcccacagcatcatcctattcatgtgcttgtggccatgttgccttttctatttctgccggtgttttctctcttcgggacacctggttgtatttagtgcccacctacataggatactatctcaagagcctccacttagttataactgtaaagacacatttacaagttccaggaatgtggacaaggtcgctgcagggagaacttagaaaacatactacgtgtgcgtgttgagttctcacctagaaactttatttctattgattccactctaaatgtcagaaatccatgttgtaggcctgcacctctgccacctgcttgcccatttctccattggcaaaataatatgtcagatcacattatgttaatttttctcttacaggtctgaagttttgttaattgccaacaggagggaggctcagtttgctaatctcccatgctaactgtgcctcccaatgccatttctgttatctccattgaccagaaatgtccatagccaagccttacgtgagtcctacctaagtatgtgtggactctgagtccccctcctcagatatagccaccaccaacacctaactatgctctatcagtcatacactgatataaagcttttattctcatgatcctggcagcatgtacccagggcagtatggctgattttgaactttatttcaatgatgatgcactagttcctgtgagctgctataacaaaaatatctgaggttggtcaatttataacacacacacacacacagagagagagagagagagagagagagagagagagagagagagagagagagagattacagctctagaagttggggagccccagatagaatccactgcaggggaccaattctgcttccaagatgacaccttgaatttgcaccatggtgaaagggctggagtgaaaaaaggccttaactccattggtgattaacagttagcaccttatttcctcttaaaaagtgggtataggtccagcaggatggctcatcaggtaagggcatttgttgcaaagtctgagcacctgaatttgatccctggcacccacatggttgaaggagagaaacaactcccatgagttgtctctgaccctccccaccccacacatcacaacacactaaataagtaataaataactaaatgatgtgggaaaattgaaggaatacagcaggcaatttcagaggtttagttttaaaagataaattccacttggctcctgtgcatccaccagcaccatttccttggtgccatcttagctgtggcaagcatagctgcatctaagctccagcccttcctctatgtgctcaccttcagcaagaagcagagcagtgcacctgtgcctgtaccagcattcacaggtggagacaatgaacaggagacaaaaaaaaaaaaatgaattcagagcaacactgtggaaaaggaccaagatgcagagctaagtcttctggcttcattgctagactatgaaaacctagatgctgtttgccctgccgctggaaccccacagggtacagctactcgtgaccatcaagggattaatggtgcatttaaattgttctcaccagaggttatgcatgcactgagccatgctggaggcctagcttcatgtgacctgctggcaaactccacaatccccctgtatgcctctgatgaggggtctgataacaatgacatgctggccaaaagtcacctcaggcatctgaactcccagaaggccttggtcccacgaggccagtagcttctggtccataaagtcttcatggccaatctttctgtcccctgacctgacgtaggctatgagcatgtactttggatcagtgcactccaccctgtgaggaaggaattcgtcaccatactaaggcaggagggagatggggttacacacagactgtctcctaaatgacagaatgagctgtgaatttggcaagctcgtactcagccccagttaacattttcctcaaattccccagcagacagttagcctggttgacagccagcttgaatgaagcccctcaatacatagcgatcagctcagcccaacaagccacagaaaaagatacaagcagggacctgtgtctgtgtcatcttaagtggttcaacagcgacttctcttgtgggagagaaaagagccttgtcacactggaggtgtctcgcctggaggataggtatagaggccagggcccattcatgctgaccatggttcatttgatcagaatgagaaacggcctatccaaagcaaatctcagtgagggaagaaatgcccatggcagccacagagctgtgtgtacacaataaagaaagccaccattactttgcgcgccagcctcgtgagtgcagaaacctgggtactggaaaaggttcattatttggaataagaatatccatattgcacataggtacacaggaccccgcccagatgtatttgcactgttcctttactttgtgcctttttttttttttttttactaagtgtaaagaggtgtaagaagttgtgaaatagggacagaaaatcacaacaataattaacaaaccactcttgctttaatcaaaccttgaggatagtggagatatacatgttaatcaatttgttacatgcaaatacaggaaattaagtcttagaaaaaagatcacgacactaagtaagagctcatagcaagggtatgacaagtgtccactcaggtatttgcctgtacactggacaagtaacttcaaagagagggataggagatctgtggaggaggaggaggaggaggaggaggaggaggaggaggaggaggaggaggagggaggtagggagagagagagatagagagagagagagagagagagagacttgaatgtaaccagagcaatgacagtgaagtaacatagtcacgtatagtgtctccttgaggatcattcgccctctcgttgtagagggagttaccggacccctcctctgttgtagtgaggtcatctcatgactcccctgctacactgagcacccaacactctactgtctcagtacctttccccttttctgttaccaccccatctctcttcctccagagttctgtgtgcttcacactcactgctggaatagtgtcctctcatccacgtgacagagcttgtggttgggtccctattttggagtttctgtcactcaaaatatagactgcttagactgcttaatgtctttctatgaaaaatggtatttagcattcacagacaactgattacaactggaaggaatgcttcatttgaagacaaattttcaggaaactgtttgaaaaaaaaaagcaaaaaacaaaccaaaaaaaaaatcccatcaattactttgttaaatatatttttagtttttttaacttagtttcctgagacataatccacctagaatcattgcccaatattcttatgacaaaaatgcacaatcattgtttgtttaagatgtacatactttaaaaaaatgtttcttcacttaaagatagtcttaccctttggcatccccaaaattatttcattagttagtttctcatatatttagccatacaagagaacctctaaatgagaattaacatgctccatttcaatggtaaaactcagtaaagaaaagtctagcacaaaagttgttccatctgagggatctctgtctaggcatagaagacagaccaagatacatctagtcacaaacactggtgatcacctattacatgctagtaacaataagttaaccagaaaattgttattccagagtgtatagagattaaaatacaaccaaaattctacagtcaagagacgatgtgaattttcccaccataactatcagctaaacttgaatactttgtattaataccgtaaaaccagtattctctaacactatgtagaatattcccccacttaatttataattaaactttgcaaaatatgtgacaagcatttaggtcaggctatgattttcagaatgcacaatacaagtgactcaacaagtattaacagacaccttggaaatgcaggtgcttcgccaccaggaatgttccccatctctcctcaacaatagcaatgcacagagatacggaccgatggaacaacagaactattgcaggctgaactgtgtctggctcacattcacagctataggtggaaatgttaacccagtgtgtctgtatttggacactgggacttgggggaagtaattaaggttaaatgaagtcgaaagagtgggatttgataacattggtttgttttctcgccccataaccactctctaccccttccatcccaccctctatcctccctgacatgcacagagcaaaggttatgcaaggctgtcatgcctataagccatctatataacccacgtaaagaattaaatcttccaacatctgaatcatgactctcatcttcaacaactctgagaaaaaaatctgctgtggaaatcaatcaatctttggtgttttcttccaactgcccccttttttgcactatcaaatttctgatcaaagccctaatttgaatcatcagtaattgtaaaaaacaatgtccatgggttatttgcaaagaatactcctctgctctgaccatgggtgtagttaagatgactcaccaccatgtccatactccaaaggacaagacacaaagacacagcatcctcccctggagggtgccatcctcaaaccacacactgcattttcttgcatcctactagtacctcttaatcacatggctaaacttcccttaaatggaaacagaaaagtcattgcaattgacgttgtccaaggcatttctattattattgaaggagaggatgcatgggggaggggagacaacaacaggcaatctctccagcacaatcaaatggaaccagacatgtgtgagccaaatagctaatatttcaatccacttggtatgcttctcccagtccttcattctaactgttgggtaatattcctagccttgttggagcctgatattttcatcttggatttattttttccattatcaagtcctaatttgacaaagccagacagtccttttgtgattaaacctgcttgttttgatcttcatattggaaggaatacaactttttcctcataattatggaagcaaaataatttacatatagcttccttaagaataaatgaagtagctgggtgttggtgatgcacacctttaatcccagcactcaggaggcagaggcaggtggatctctgtgagttcaaggccagcctggtctactgagcaagttccaggacaacatccaaagctacacagagaaaccctgccttaaaaaaaaaaaaaaaaaaaaaaaaaaaaaaaaaaaaaaaaaaaaaaaaaaaaaaccgaattcgagttggaattctgttgctccacatagagttttcttcctgcctaactaaaggatggctcaagactacctatgaactcacttcaagatctatgaatggattcaatttctgtaataaagacaagagacacgtgcatttggtggtgaaaactagtctgaggaaaaaaggggacacattttggcctatttatttattaaattatctaaattacaccggctgtctgatggctcatggtgtggatgctccttggcaaaccctgtcactgtatttttgattcttcccattctattccactactattgtaagccacaatgcgttacacctggttgtatacaaatatttgtatggaatgatcagctcaaccatcaagcacactttaaagcttgttgtatgaagcattgccaggctactgtcccaaatgatttgctaacctgtatttctataaaaattataggagactaggatctgggagatgtctggtcagtaaagtgcttgctgaacaagcaagtgtgagaactggagttcagatcgaagcatccatgtaaatcccggtgatgtgtcatgtatctgtaataggcagtctccaaagtctcactggccagcccgtctagtcaaactggtaagctccagattcagtgagatagaaaggagttgaggaaaacaccagatgtttacacacacacacacacacacacacacacacacacacacacaccacaatacacatacttacacttactctcatacacacacacttgcacacattcacacactcacactcacacacacacacacacacacacacacacacacatacacactactcactcacacacatcttgttgagttctaaaggttaaattcatcgactgggccttctgggaacaaagagaccacaactctgggtcttgctataaagcccctcatgcctgggattatccagaaaatgtttcctgtggagctcagtgagaagcgagggacacaggtctgggaaaggagagagatacacaggagtgtcctattggcaaggtgatcagcagggataagagaatttgtgtttcatagtctgaagcccaacagtcatttgggcctcccccatcccccggggagaggcatagtcacccagcactgatatttagcctaccatgggcaaagcagccccatggcctggcatcagcccccagagcttccacatttcaggtttttaaggttgctgagaatttctggcaagtgtgagaaagaagagtgctacagtctcacttaggacacctgtctggaagtaatgacattatataacctggtgtatgtgaaccattctagattctcctcaaacactactaaatttacttgcaagactacattgaggtatttttgacagatgaggaaagaatgtctctttccttgtggacacccttcccttggccactggttgtaaatgaaccagggtggagtccttgatgctctcaccaccccaattttaaagctatacagaacacagggccatatgtggccatgctgctgcagagcaaacacctgctttccttaaaatgacacctgggaaacaataccatctgtctttcctacaggaaggaaggctacccagcatctatctgtctctgagagaaacaatggattgaagatatcttaatgtaacccacaaaataatgggtagatcattaagacttaatcatcgacagaaagttgtattttatttaccaatctcaatttgctctctgaattgaattaattgattagctaatttagtgcctgatgccacttgttacctttgaatagcatcactaaactttaaattactaaagtttgtgaacagtgaattagaagataggctgtgttgtctccattttgcatcaaacagacactataacctatatttctataatgccaacacagccacttattaaaacatttaaatccattgcctaaattataagtcagtaatctaaagagtgttagtacaaattttgctcagacatggtttgaatcaaagcagctaaaatacgtaagctccaaaattttggttacagggaaaacctagtgtggcatggtgggctggttggtggctttgcccttgaaaatttgaatacacagactccttgccttgtgctgtgccatgtgcttgagctgtacagttttccatgcatagctgacagatgagggaagaaagagtagagaatcgccctcctaagccttagattggaagtgacccccctccactagtgagagctactcactggcttctagatgtgtctgtgtctgcacagctgtcttacaaaagcagccatgcactgtgaaaggggaacgtgacgttgtggaacacagctaaatatcaatatcgttagtggaacttagctaggcagcatctggttacaaaatcccctgaattcaaatccatcttgccaacccagaattggcctacacttgtgatgaaagagctgacccgaataaaacgcctgatgattctcgacagaactggcctgcatatgtggtctgttctcactgattcctcaactcgccttgacagaaagtctgctttaagatctcactggccatcttggtcggaaatgcatggaggtcttctgcaaactttacctgaactgttttaatgacctagtagcgcatgtgtctcatctattttgaccgtattcacggctccaatcaccctccttatgccctcttcgctcccaccagtccctttcctcttcccatgcctccccagcttctactctcatactactgactctttaataatgtcaaatagcaaaatctaccaaggatatatgtgttaatatgtatgtatcagccattcatgcgttgggcggtacctaggctgcttctatgtcttggctgctgagaacactgctgccaaagtctagatggagcctgcaccatggagctctgctttcctggatcctcgctgcggttgacagtcacaaatgcttctttagttacagcactctgtccatacttcttctccagctcctctggacttttcatctgaggtgccttctgggtattctaacatgctcatgcattgctgtgataaaacctcatgaccaaaagcatgctggggaggaaagggtttgatttatcttacaggttacagtccatcactgagggaaggaactcaaggcaggaactgaagcggatgctgtggagggatgctatttatcggcctgcttccagactggaatttagctgcctttctcatacaatctgggcccacctgtctaggggtgccatcacacagtgggttaggccctcccacattgattcttaattgaaagattatccccacagacatgcccacagggcaatataatcgaggccatttctcaatcgatatcccttcttcccagctgactctaggtttgcctcaagttgatggttcaatgtaacaatgactccaggtgtcttctcatagtacttactcaaaagaatagaacagaaaagaatagaaattgcaccccaaacttcctagtgagaggcaagactaggacaaggaaggaagtctgttggtaagacagagggtgctgcaggcccatcaggtagtccaggtagtccttggctacacagcaagtttgaggccagcctgggctacatgagggactgccatctcaaaaaccttagaggaagaggaggaagaagaagaaaagaaatgctaagtgaccttcacaaaagcaaaataccaaatattcaagtcagtgtacacaaggcaaactgaaagagagagagagagaaagagagagagagagagagagagagagagagagagagagagagaggaagctggaagaaataggaaaaataatagtttcaaacctcacagaaacagccacacaggaattttcgtttgctttgctttgtttttattactttttaaattaatcgaaaggaaatctctcatggatttgataacaatgcatctgttcctaataaccccaggaatctctatttatagacatcgactgtgttgtcgaaattaaatataacgtatgaacaaaaatttcaagatgcatttaggatttacttcctcaataaagcataccacaaagggaataaagaaattctttactcaaattaatggtgaattcttttgtcatgagaattcgagtttatattcgtttcagtgaaagcacataaattgttctagacaagaaaaacagaactagcccaaggcagtattttcattataggggaaggcacatgtccatgaatatctagtttaatattaacaaaagccattcaattagctaggcatgtgccattgttatgaatatttattggtgtctcagctaagtaacactgatatcttctattctctggtttagagattgaaatgttacaaacattaccctcctgccctactgggagataagaggatttgaatcctaaaaagaaaaaacaaaactgttccagctacttccagcactaacaatgcaggtttccttagcacttgcaattttatgctcaggaggctggatggttgactgatcctacttctcccccgaaataatttagaaaaaataattctgggagctgatactgcttctgtgttattgaaaattcaagattgaaaagttgtttctccttgtctcttgggatagcagtgtcaatggagagaggaaaagatgaaaattacaggtgactgatactaatcagagctctctgatggagacatgctagacaaggcatttcccactcaggactaggcttggagactcaatctggggctacctcctgctaaggcagcaaggaggtgttctaagacctaaggagaatattttgtgtgtggactttccatcctgacctgactggtgagaagaaacacattttctctaccaaattcaaatcgattcagctttttcttggaaaaacaaacaaacaaaaaaacaagtctttgtaccttagctgggatggttaatactgactgtcaaatggacctggtctagaatcacaggcgatgcacctctgagatgtcctttagggagtttctagattgggttgacagaggaagacccacactaaatgtgggcagtggtgttttaccaacacagtgtgacagctgcctcacacatctgccaccaagccttctggtcatgatggactgcaccctccaaccatgagccaaagatgcccagtttcatttctttcctcacccctcactccctccctccctcgctattgtcaggtattttgttacaaggttgagaaaagtaactaaaagttataatttcagagaactgtatcccctaccacaaggccagagtttccttcccaccatttggaaaaagtcagtatggggaaccacttagcagctgggatgaagctagaacagctcttagtctagcttcaaggttttttgttgctagtcactagcaggaagctaatgatcaatcctcttccctcagtgtgtcatgctcagaaatgttgtatcttcgttgtgcttctatgaccagacagtaatctatcagattatgacctctgcatatgtgtgtttacattgcattcccagtgcctatcaatacgggtgactccttcagaggctgggtaactaattgatgaatgaattattaaaccttagccttggacatggacaccaatgatagtttaatatggcacaccctccaagcagatttacaggctagatatcttatctagacccaaaggcacctgcatgggaaaggtttaccacctgcagcagaatggtgatgactcctggggaggaagtggtgccttttcctccttcctttcgttcttcctgggtaccgtctagcgccctgcatcccttggtaagccaccaggatggtcctctgtattctcagagtgcttcaccttctgccctgctcctgggaaggtgaactcttctcctcttgccaatggccccgcggtggcctcggcagagtgatgggtctgcatcaagcagccaggctagatgaggacataactcgagcaatgggatagtaatgttctcctggcctagggctttgagtgacctggatagcacaagatctttagtgctgtcaggctcccttcctctctcattacacagctcagggtcaacattctaagagggattgaaattgctgtccttggttggtatggaattaaggagagacttttgtccttataaccattaaagtcttaattaagtcaaaaatgggaactcattacctcctgtgcagcttgggatctagctttccaattacatcattgctatgggctggggcctgcagcccctgcttctaaccatgatgtctctctggcttcagagtgatcatcagaaatctctgctctccatggatacctgaggtcaaccactgggccatgagatagtctctctctctctctctctctctctctctctctctctctctctctctctgtgtgtgtgtgtgtgtgtgtttctggatctatgtttatttgcacacatatctgtgtgtgaatgtgtggaggccagaagttaaccttggatgtcactccttttatatgaaccccctttcaccttttatgataaagggtgtctcgttgaatctgaaatgcatcctggctagtgaaccccagtttccacttcctgagcactgggaatacaaatgccaccattcccagaaatgttttctatggatactaggggtaaaattcaggtccctgttattgcctggaaagagcttcaccaaccaaatatctccccagcccccatgcttcagctttgatagcgtacagaagcacagggatgcgtcgttgggtcttcaggaccagtagtcgtgaattcctccaggaaaggactgcatcacagcctgctgggagactactcctagctatagtaggtgacagctgctccatggccatctgtctgttgtgtgggtggatagaactgtcagcatgggtcacagtgtccagtgacagagacaaagacagactatggttttcaagagatggcagcccaagtgggcattgcgattacccacactatttagccagcaagctatctagctgtccctgtgtcccctgctaagtgcatgggtcactgtataggggagaatccccaaaagctatattcattaatgattctttgcatacttttctgtactcagtcaaatctaaaatgctagcaatcatggatggaaaaccattttacctaagaaataaaaattgcatgccaaactcttctatggcactcatagtgtcgttgtgaggaaaatccatatatgaaagttctcaggctgtgaggaccttgattgggagggtctggagtggacttgagtgtgagagtgtcaggtgtgtcaagattgacataaaggtcaatggaggatcagagggaacaggcaggctaatgtagactgctaccaagagaaaagcctgcaagtggcatctgtctaacaacaaataagacataggactaggagctaactctataactctattggtaaaaggcttgaagcacacatgaggacctggttttatcatcatcacccatgaataaaaggctagctgggcatggtggtgcatgcttgtaaccccagcaccagggacacagagagaggcagatccctagcctctctagctagggactcactagacaaccagtgagatgctctgttttgaaatatctaggtagtcagtacctgaggaatgacactgaggaaggggggaagatggggtgatgagataaagagagggaggggaaaggaaagggggaggggggaagaaaaagcaagctataaatcactactgtgaacctgtttatttacaccccaaaaccaagaacacttgatcaaacaatggtttttgtttcataaataaattcacttttataagaatcacaaagaaaataaaacacataactatgttattgttcattgtacacacacacacacacacacacacacacacacacacacattcatgcatcaagtttggccagtcatattgtgggtgtctgaagtgactagcatattaaacaacaaagctttacattctgtagctgtttatatttatataaactagtagaactcttgagcttctatgatttctctttatcactataatggagaaatgtactagaatgggtgttttaaatctctggaaagccttctgtcccaattcctgttattgtagttttctatagagaagtgtgtaatacagccgggggatgactcagtgtagaaagcacttgctatacaaatcagggggccagagtttggatccctcaaacccatgtcaggctggatgtgtggcagtacgcttctgcatccccagcatctctatgatgaaatggcacagacacagggaaatcccaggagttggaaggccaactggcctgctgtatgcactggaaacaagagaccctgtctccagcaaggtgaaaggcaaggaccaacccagagactgtcctctgacctgtacatgtgcacagtggcatgcatgtgcccgcactcacacacacatgcatacacacatgaacatacatgcacacaaacactgagtataagagaaacatgataattaagtcataaaggtgcagtttgctcaaattcaaagataaatcctataacttggacaagcatagccttgtgtatctcatgcacacatgcatatagtacatatagaaatagcaaatagataaattcaaatatcagcctcagattcccatttgtattttgctcacatgtgactaagtttagcctaaatgtaggtattcagtgtccattaacatgcgaccctatttcctgaagaatttacattgcagtaggagacatgtctatactccaatgtattctacaattctgcccaaattgctttcacagactataattttgttgtgttaagtatgacaggaaataggtagaacataagattttacatattcttgtggcgggtaggagctttcaatggaacgagtctgcgtaccaagatgacctgtactgttactgagcaccgatgatgccccaggatgctggattcaggaacattttccaagcagcctagggtcttactaagatggccttggctagggccattttagttttccagtggttcttaatagcccatatgcatttgtccatggatcaacaacactgaaatattcagactggatacagatataaagtacacaccctactccccaaatttattatgaagaacaagaaaagcaagccataaaagtcatgctgatgtcacatgatcatatcctaaatttaattttctcttcagacccattcccaaatcaaggtagcagactccctgacccacagaaccatggcctcagatcctggcagtggccagtcacctggcactgattaattttgtctcatttggtggccctgcctgaccaaggctggattttctggtggagtttggcaggtacctctcatcccctaagtaaagaaaagggaaatctcgtgtctgaaggcttattttcatttcacactaactcacagaattctgcttgtccgatcatctactttctgagctgaacattaacacaaatcggacttttagaagccaaatggaaaaactgcagtgataaagtattgaagattaaatgcccattttattttacttcttctgaatccactctcactcattagccttttttttatatccttctgcaaaactgcctggtgcctgatggttttgaagaaaaaaatagataaagttcttggcatcttatcagaagccgaattattgagtagatttacaccatactctaatgatggcttagagatatgtatgtctcccctttagctcatctaactttccctgtggttgcaatgccaggcaatcaatcccatggagagagacttacctatttcttggaagggaatagaaagagtgactgttcagaggaccgcagctgtattaatatacatgagcaagcaacagctagtgttattctacagaaatgaatgaataaataaatagactgtaggcactttattctcctcacataatttcttcctggtgacattattgaacaggcggttgaaaacaaacatcgttaaaagacggacgaggagaggcagcctttcttactccccactgcaacattttccagtgacgaatgttccctaaatggattgggctttttgaaaccaagtcagagagaaatttgatgtggccccatgacccctggaaagcacatgcgtcttcacctgtcacacaacacaccagtgcttgcttacatttcagcagagactatcgattctgctgattggctgcaggcgagtccataaagaacaaattacaaagtcagaggtccacagttagcaattgcttgcatgataacaggggtctcacaccaccctcagcattcgccattaacatcctcaccaacacagccaatggagaaagcagagcaagaaagccagggtccacctcttacagttgtctgcaaaggctagaactacagaaaggggtatgcatggtgtgacacagagtgttcatgtggtgtgtatatgtgcacatttgtaggtgctgaggggatgaagaggccatataaacgctgggtgtagaaaaaggaacacagaacatctatatggtttagaggcgaagtttatttgtttgttcacactacatccattaaaaaaggtgaaagaaaaatactgatgggggtggtgatgagaagttgttccagtcaaaacttccacagtacttgctaagaaagataaatgttttagaaatctgatacaatgttttcatcagatcatgtgaccatatagacaactgatgacgaagggccctgaacaggtacttcattctcgccttggagcaaaatgaagatttggtttgacagtgacacttatttactcatagtcgtagctgtatttaaggggttgctgtgcctagaagatgcaaccgcatgcccttcataggtgcacaaacagcagaacttctaagtatatcttccacaggactgtcaatattagtaggaattaatattgctctgacagaactgctgagcaggaatgtaattttaagtgaaaactgaaatgctggtcactttatttcacatgacaccagagcaagtcccaaactcagtccagaaagagttttggtgtgaagtttggctatgccaatcgcctgctgaattggatttgtatgcaaaaaggcttgcaggaagattgtgtgaacttggaatgaaaaatgacaaatccaggttggggctctgggtctgaaacatggttgagggttattggctgccctctcaggcctcataaaatatacaacgtgccaagtaaggggaagccttagcctccaaagccacagtcttcgaactcccatggtgctccttgtaaccttcctcccatcccctttggaactccggagctctcaaacacatgagtgttttgcacagtcaggtgaatgggataagtctgtcatcctcttcagcccctagtagctgggaactgacttggggattgagagaggattcgggccatttatggtcttccaccgtgattgctattgctaactctgctgtgaaatatgtggagcatctggagagggaattcaataaagtgtggccaagacagcactcactttatgccctagctgctggcaaccatttaagacagctctgagacagatcatatgacctcagcccttggaagacctcatcacttttcatgggagatctggaaagtgctgatcccggagcgcttatgctgatggaaagcagataaaaatctgcaggtgtaactttttaaaaatttagtacatggagcataaaaaaaaagtcagtaccactatacatcatctaacttcaacaccatcttatagatataaaaacactcattagatataaaatctttgggtgcgtaagaatgtacatacagcaatacagcacagtaaaaggcagaaaaatgttgaagacaccaaatattgtactccttatagtcctgagaggatacagcctctcagtgtcaagataccaaataatttggtgataaagttcttcagccttttatttttcccattggataagagctggtttgaaagaatatttggagaacattgaaggaaaagatcggtggtttgatggacacagatatatagctaacacattggaaatgagtggacaaaagaggaaaatgggaaatccacccaggaattgatttttggaaggacactgaatagacctgacttcctcctcacctcagcaaggagctgaattggattttgagtctaattcaaaacttaatcctaaacccaacccagaaaatggaggtcgggatacaaatacagtgggccctgggaggtatgcaaacctgctttgtcctaacttcaaaggcactgcactgaagaacaggcacataattgatgggggaactacttctgtgtatgtttatcttattgactgttgaagaaaatactgtttggccaatgagatagcaagttagatgggactaggagtcaaagagaattctgggaaatgtagtagagaagtggtgatccaggcaggaagtgacatagcaaggagactcatatttaagcaaaggaaactgaaagtgtccccttttttcccttcctcctccagcggtaggatgtgatccaccggcaaggagggacgccaacaaggcgtccgataagataagtcttataaaagatatagatttatgataattaagactgagctaacagatgagaagtcctagtcattggccaagcagctttgaacctaatacaagtttctgtgtattcatttgggccctaactcaggcgggcggctggcgtaaaactcacatgtggtggtggggctcaggcggcttttggcggaaagatttatcgtaacacataatgacattgttggggaatggatgggcatttttatctggctgctgtggtctgaagacatcaaaagtgcttcacaacactcaggtgttatcggcacacgccactctatgccagctgaaaccacttatggaatgacttatctaaaaaaccagacaaacaatattgagcttaagggagaaaagggcatatgagcctgggttagcatgcagtgtgggggatcatatgcttagtttccacatccaaatctcagctccttccaacctcctcttctactttaaggtgtccagaatttctacagtctcaacccatgctgtcctgacgcatatgccctgccgcttaggccttcctcagcccaccctaccctgccaacttgtctttcttctctaggtctcatggccccatgaacattgtagccagaacttgaaatgaaaacagtgtcatgcccctgtgacccccttgtcttcctttctcccacattctcaaccatgacgtctcacatgttttaggaccaattaatctctcccctcccctccctcctattctctttctccagacggttgtgcctctgaactgacaccataactcaaatatcacctacctcttctaatcagttgtctaagaaagcctgctaaacagactagtgccatcactcgctagctcgacatccttcacggaatgcctctcctccttggatacaaggtctcagtcttgtagctctgacctcaaagtcacagagatcagcttgcctttgcctctcaaggtctggcgttaaagatgtgtgccgccacaccaagccttcagtgaatctcatttgcccttgaaatcaaatccagattccacacggtggcatgaagggctccttctcttctgatccctgatcctgtaaggtccatcttcatccacattcacggtctactgttttgagcttagcagccactacagaccatctgcctgcctgccagccctcaccctatctactgatagggacttcagcaatgagcacagaagaaacatgggacctctaaaccaaatctcaccagaaaaccatatgattacatccctccaaagcacactctctccttagcttgactcagcacattgtaagtctgtttaagctgttaggctgcaatctccactggcttgaacaatcccatttagaaacccagacctaagattctcatggaagtccagctctgtcttctcccagatgctgtgcacaataatccatgagaggaaagcactaatgcttgacagctgtaggagctacagaacatttaaaaggataccaggtattttagggattctgttgccacaaagagacaccaaacatcaaacaccaaacagagacatcatatttcttagtagctgtgcaagatacaaacagcttacaaacataatttcaaactctgaagacagatgaaaactcacctttgattctaaagcaaaacaatttccaaacaggtgattggtttcccctgaatttccagaagcgatctcatggggtgagtgacccactgcagagctaagatttaagtgtccacttgacacagattagaatcgcctaagcagggagcttcagctaagaaatgtcccagttcagatcggcccgtgagcatgtctatggggcctgtcttgattgttgccaacgtagcagagtacagactattgtgggcaggaccattccctgggtagattgtccccggctggataattagctttagttaagcacaagcccaagtgagacaacaagcagcattttttcatggtttctggatcaagtttctgcttgagttcctgtcctgactccttccagtgataaactgtgacttgtcaactaaaataaccccttctcctctcttacattccttttgatcatatgggtttatcacagcgacaaaaaaaaaaatacttgcctagacaatttgtagaaaaaaaacaaacaaaaacgtttctttcataatcaatgataatctttttcaaggcagggtttctctgtattgctttggagcctgtcctggctcttggctgctctgtagaccaggctggcctcaaactcacagagatctgcctgcctccacctcccaggtactgggattaaaggcgtgtgctaccaatgcccagcaaagatttatttatttattatgtatagttttctgccgtatgtatacctgcacaccagaagagggcaccagatctcattatagatgttgtgaatcagcacgtggttgctgggaattgaactcaggacctctgaaagagtagtcagtgctcttaatctttggaggctgtcctggaactcgctcttgtagaccaggctgacctcaaactcacagagatctgcctgcctctgcctcccaagcgctgggattaaagatgtacaccaccaatgcccggctcaatgatcatcttttaaacataaaagtctgcttcctgtgtatatatgtttgtgtatatgtgtacatatgtatggaagccagatattgatgtaggatgtcctcctcaacctcttaccttattttttgagacaaagcttctcattaaacccagagtttaccaattcaggtagattggctgtttaacagatcccaagaaccctactgcttccactttctcagtactagcaagatacatgtgatgtaataagcccacattttcacacaggtgctagagagatgaacgcagctcttcacagctgcataaactgagccatctccccagatcctgcctccttttgacgagggctgattccttggttataacccaggaattggcaaagaatgtctccttttctctaaacaattcattcattgttattttgactcagcctccagttctagacttcagtaggatgaccaatagttaatggccttcgttggatttccatcaagcaacggactccaaaaagcttgagtatgtccttcatttaaagcgcctaataggttcccattcagctactttccacttaaacagcatcaagagcatccttgactgtagactgcatacagaatgttttccaatggaaaatcatttctttcgtgttaccagaaggctattctatgactctatatatcttatttagattcctagatatttccaggtactccttagtagcatgtcattataactagtaacagcttagatgcactgagaacctgctctgcacaatgtcacatcttctggcaagtacatgaaatgggtcctctgatgatctcttattttacagggagaagcaaagcacatcattgccaagactgcaagcacccattaacaagtcatcctgtctccagccgctgaaactggaataggtcctctggagtttcacatgatctaccacctacacagttttaaaatagtgcagcactttctcagtactgggggagctgatggtttaagaaatgcgatttctctagaagacagggtcttcatccaatgggaattggcgttctctttgtgaactggttggccttacagagcgaacactatggtttttatataaaatattccagtcatagaacatcctcaacattgaatgctattggtatttatcaaacatttatgtattgcttatcataagggaaaataaggccttgccatgagtcttaactcacacagtttctaggcatcgatagcagactttttgttacaaatattaactagggtgactagaatttatctgtacagggcttatccttcttttcaatatgtctaaaaggttttctgtactggcaaggacccacagtcagattcggaaggaaacgtaaggatgatctccaattcccacaagcaaggagaaacagaattctagggagagcgaatgacttgtccctggtcatcctcagttagtagttcagactcataattcatgactggtgccactaatccagtctcatggttgatattctgaagagcgattgaggttgattcattgaatgactgcaaggcacaggattgggtcctgcctatacatctgtgccagggtaaataaatcagtcaagcatagcccccaattactcaatgacgccacagatcctgtgctaggcatcttatgaattgatgatgatgatgatgataatgatgacgatgatgacgatgatgacgatgatttcaatagtgggaactgaacccaggcccttggtatgcaagatacacagtctaccacagatctatatccccctcctccattttactttttattgtgaaacagggtctcactgagtcacccaggctggatttcaacttgtgtttctccagcctcagcttcccaagtagctccgcatacaaggctttttctttgggtgccaccaaccagctcccaaatcatgacacagagtcttcttatttagttatgaatgctcacccttatcttagctcttattttaatctgcttctctttgtgtacattttgcctcaggactttttagcctttctttctgtatgtgttgctctcctgctgtctctggctggctggcagtttcctgcctggtttctctggctctaggcctgtcctcctctttctcatcattctcttctcctttcttcacttttctagatccctcctatttattctctctgcctaccagccctgcctatacctctcctacccagctgttaaccatttagctttttattagaccaatcaggtgccttagacaggcaaggtgaaacagcaacacatcttttcataattaaacaaagtaacacacttttacacagttaaagtaatattccactgcataaacaactgtagcacaccttcacatagttaaagtaatattccacagcataaacaaatgtaacacacatttacacagttaaagtaatattccacagcataaacaaatgtaacacaccttcacacagttaaatattccacagcaaaatcaaatgttacacacatttacacagttaaagtaataatattccccagcagctgggatgaaaggctatgccaccaggttggacgtattttaggcattttgtactgtttagactttcagtgtgcacagcaacctagagttttatgagattctgataaaactccactaactcatctgaagtcacagaagtagataatagctcttagagattctgaacccagggtttggcagttgggtagataagggtgatttttgtttttaaagtatattgctgctttgaaagagggtatggagaactggatgcttggtcctgctcttcagctccatggactgacaggacagagagtatacctcctgaaggtgcttgctcccttccagtgtggacagtctgtgccttccactgtagctctttggtattttagacctattgatcaggtgatttttctgactaggtactttactttatgagttgtgtcgatgtctggctataactcattttagcaaaacgacatgtcttttccctgccaagcagaatgtaatgtaacatgactcatcagaaaagcaacatgacacatcagaaataaatgctcatgactactgatttaggtagctaataaaggcaagcacattgtattattcatgtctaaatgatattcatggataattcagtatacccaaacccccagagatgaaacttctaaggcgaagacaccaattctgtagactttgctaaatcaaaccagatgtgctgtgctgcaagacacatttttatcaaaagccttgctttataaataggcctactgcccagactcattttcagatcttacagcaggactcggagcgtatcctgggctctgtttggggtattataagaaacaatctgtttcagaggactcaagttcttcattagatttctctctctgagccatctacaaaaaacaaaacaaaaacaaaaacaaaaacaaaaacaaaaacaaaaaatacctcgttttagaggaggagtcaggtaaaggggagaggctgtctcctgtgggctgggtatgcaagttccagccagtgtgcctagtcaaaagggaatcacctgtgttgataacggatttccatgatattagaagatcacaggcctcacccaaggacagctggccttctcagatcttctggctcacaagaacaaagttgtcagtgatggtccttgaccattgtttttgttgttattgtttgagacaaggtctcactacacaacccctgttcccttcagattggtaattctcctgccttaacctcctgcgtgctccgatcacaggtgtgctccagcgtgcccacttcttaaatgaacttttttatttataacttaaaaagagtgttttactgtttaaattgccactagtacctgtatttacagaacacattataggaagctatttagtggatttaactagacaatttcccttaaccctcaaagctagaaactggaattttctttattgactatttgtagacattttcttatgaacatagtagacattaaaatattttaagattaattaatgggtaaattatttctactctatagaaaagaacaaaaactaggatgccgcttgttaccagataattacactgtgtttgaaaagagcattccagaaattgatgtgggacttagagccgtaaagagtaatttgtttattcgtgtgtgtgtgtgtgtgtgtgtgtgtgtgtgtgtgtgtgtgtgtgtaatagagaacaactttctggggctggttttctccttacatctggggttctgggtttgaacttgggggtttgggcaagcacttttatatactgagatgtctttccagccccatgaagagttttttgaaagcaatgtttatggatcttttcctttatactactatttctttgtttcatatcttcattacagttcacctccttctcttattccacaggatggactgtgtgtgtgtgtgcgcgcgtgcgtgcgtgcgtgcaagtgcacacctgtatgacacaaacagggacttgcactcacctcctcccttgtctcttggctgctaccatctaacttcctgaaattagatgtctccctgactcttgctatctttatacctttctctatttccctaactggaatttccatggaaaaaagatagtgaaatctatatctgaagtaaggcttgcttctgtttgaaaacaagattttttatatttgcttaaaccttcagtcgccatttttctcatcaggtgtattccttgtcatgggtgccatgacagccttagatactgatttcaccctattatctacttagaaatatttcaaatagacatttagcaatataatatttatgtctcgtttgtatgaggcagaaaataaactgtaaagagatgaaagtgtgctttagaatcctaacaaagcaaattgacttgaatgcagtcatgggcttgcattgtgagtccagcctggtgtgtgctaaacactcagtcgtgttttttaactaaatgcttggactgaggagactgcagtgagtcagtctcaacactggcaccattcgagctattcagtcatttccctgagaaaacaggaccacctgtgcagcaatcccacttgggacttggtgtatccaacacaactggttgaataagtcacttgaattcatttgtggtgattagctttccaagggagaattttctgtggtagtccaaagaaactctgcattgttagagcagtgcaagggaagagaaggagagccaaaagtgatgctctcttttcctggagacagttggggtgtagctcagccgtggagtgtgtgcatggagttctgagttcagtccccatctgtatacatgaagacagtctgcagtagagaacttaagaaataccgtcactgtcagtgagagcaagggaaaaatacccatgtcactgcatgtactttttgccagtgtgaaaagaggaacactcagcatgccgcactaaatgctcacatgtttgagatctatggatcttttattttattcatcaggagataaaattggtatttcactcttctctaaatgacttctgttttagggtttctttcttttcttttttctttctatttatttatgtattatttattttttggtcttttgagacagggtttctctgcctgtcctggaactgactctgtagaccaagctggcctcaaactcacagagacccgcctgccacctgcctcttcttcccaagttctgggattaagtttgtgtgcatcaccactgcccagctctcttagttagagtttctattgctgtgaagagacactgtgaccacagcaactcttataaaggaaaacatttaattgaggtggcagtttccagttcagagctttagtccattatcatcatggtgggacatgacagcatgcgggcagacacgtgctggagaaggagctgagggttctacatcttgatctacaggcaacaggaagtgaactgtgtgcacactgtgcatggcttgagcatagaagacctcagagccaacctccacaatgacacacttcctccaacaaggccacacctcctaatagtgccactccctatgggggccattttctctcaaactaccacatcatcttagtagataaattcatccaactatctcacatgttgggcccaagaacctgtatctaggaaggtcatagacccccagcagagaacctaggactgccattcttctaaatgcatgtagtattcaacttactcccaatgacttcttgttatagccatagattagcgagcagatctcccaaacctcataagagaagcttatatttgtagtaatcaataagagatatctatagtagatcaatggacagaaagtaagagactgtgggatgctcagctctaaatgggacatctataacatgacccaaggctcagagataattatgggacacgaagcagaaagatagtaagagcgctggctcttccaggagacagggtcttctggacatggcagggcagttgcacacatgaactcacacctgttctgacagcatacacaaggcctgtacaagctcaagactgaaaacataattcccagcatggaggcaggcaggaagtccctcccttagctgaggaaatgataaacacaacttctctctggcaatcactacagcttataatgccacacgacaaactctcactgagaagtgaacatggcttgcaaaccctaaatcttccccacaggaacagagcacaccagtgactcactggcacagcactgtggacaatgttggagaaatgggtgaaaaatgagttcaactgaggagtatatatttaccacactaagcaaagtatcatgaaaactctatcagttggggacaggctctggaaaggcagaagtacgataggatatttctcatatagcaatttctttattacacaaatggaattttgcttttgatcccatgagaggaagactcaaaagaagccatggcaacaatgacgatacaaatggctgattctgttactgatgaaaaaggaaaatagattttgagccatggaggaaataaaacaagtctattgctttcgttgttgataaagtggagttgcaatatatggccttacatcctcaccaactgaacaagagtctggcagacttggctacccagccttaggtagaggagggcaaacccgccatcccccactagctaccacatagtgagggaagagctacactaagaagagctactgagaagtctttcgaatcctaagcaggttaatttctcaagccagttcattctcctaggaaatgaagacaattattgaacctgtctcaaagaattgttttgattgtggtattaaataatttatagtggacaaaatgtaagagctcaacaaatgacagctgttcttacttgaagtggttctatgggactggaataaaggtaagccaataaactgtggtctctattgttgtactttagggatttccagacaataggagataaggtcaggacacactaggaaaaaagatgcaaaagtactaaaactattatgtttaggcagttagaaaattcagaaactctaaccacagatggttagaattgtataaaagttgataaatcaaggtaacattttgcaaaataagtacatgtaactagttaaaaaaatcaataaacccatacacctaaaattaaatcttgtaaaaacaactacacaggatttattctacacataaaatatataagaccatgttaaggggcatgaataaaacatttgtatggggggtcgtcctggtaagttgaatgttgataaataataatgcagtttttatattgaaggggcaaaggcaatccacagaggatttttacagttgatcaagacaaatgtattttttcaatgatcacacaaagataatttagttatcactgtacttctcattagcagctatacaattgacctgtagatagaaacgacatgaaagagagcattgagaaatatgtctatgtatgggtgtttttcaaatttgtggagaaaatatttgtgttataccctgaaggtgttttgagacaattggctagtgccttgaatggaacttgtttaatagtgtcatatatatatatatatatatatatatattatatatatatagtcacaatatatagtcacatataataatagtgtcataataatagtgtcatatatatatatatatgatcaaatatatgacatttattaattttcaggatgtagatatctgctttggctgccctttctgaccattaaataaaggaagatgccatgcattaagagattgatattctacatccaatcctgaggtgtgatgttaaagaaaccagaaaacttagaaagagaaacatctacaatacatataacagaatttgaattatacaaagagacaaaaatgcaaaagattatttatggcttggtgggaaaatatccaagaattgtttttaaagtaattgactaaggaataaggataattggtaaacaaaatgtcaactggattacaaataaatgaataagtgccctgtgggaaattaaaagtggtgcctgtggctgtggaaactgggctaggagttagcctggagaactcgtactttcaagaacttccccagaatataaaccggtagaagctttctgatggagtatgaatacagagacttaaaaatatttgacgctagttcacccagcaattatatattgaagatgttttccctagaaaaggaaagggcactcaggaaccgtagcacagacgtgtttacttcaagttacataagccaagaattagcaactgcatgaatgtgagctgtgaggaaattacctagtccttccccatgaatcttataaaggaatctatgtactcagtaaaacttagttttagtgaagataggagggcatgcctacatatggtttgtttgtctatttattcatttatttatttattttggatttttgagacaaggtttctgtgtagctttggagcccgtcctgggacttgctctctagaccaggctggccttgaactcacatagatctgccatgctgtgattaaaggtgtgtgccaccaccgcctggtgcctacacacattttttgttaaaggttgacttttaaagatggccaccatcattttatttttaaaactttgccaataatcaacctaaaccaaggttggcaaacggttcgtgcatagggctagacaggaagtatttcagcatcataggacagctggggttttcttctgcatattcaacttcatttgttattaataactctttagaagtctacaaacctttcttatctctgtagttgcacaaaaacagcagccgaacacttggcctacagactgtagtttgccagtcctagtcttagataaatgggtgtatcaaccagacgttaatagtggtgatctgtcagggagtgccactatttcttcttaatgcctttctatattccctcattttatagggaagcatatatcatttaccctcaaaatgcaatgccaaaagtattatttaaaaatagtgtacagggctgggaagatagctcagcgtgtaaatgcttgtcacgggagaagtccctgaaatcagattcccagagcctgggtgtatagtttgcacctacagcaggatacagaaagggcagagctatcaccccagcagagaagaagagacaggaaaatctatacaaaatttaagtcacatgatctccagtggggctgtgtgtgcacaaatatgcctacacatgagtatgcatgtgtgaagggatatgttggggggggggagcgagctcttacctctaaactggttactatgagatagcaaaacttggaagtgttcactctacccgcttgttgatttgagtcacaactctctcctctacccctttcccccctcccttctttcttcaacagctttactgaatcataatatccataccatgaaattgacccattctgagtttacattcagccgttcctggcccatttacagaatttcttaaacctcattcagttccctcccacccccagctaaatctagtgctattcattgatagcaaaccaatgaaatgaaagaatgagttaattatgaatattgaggtaccataggtgattcactagatctgctgttcaaaagccaaacccacaggacaggaaactgaagggtggaagcactgctattcttacagggagaatttagacacggaggagattgcaggagagcaggagatgacacggatcagactgctttaaggggtgggctcggagaagggaatttccattttccaatagctcccaatacctgggacaagagctaaattggtttgatgacaagtttgttcttacagcactgtgtatgcatgtacctcctgtttaaatattgcgctttaggatcttctgtgagttccagagaagtacatgacagagagacagagcaccgatgtatattctctaattcttcctgggctgatgactccagtcagtcacatgatctctttggcaccaatatcaggagacactgtctgaattgcaatttgctggataagaatacagttaatcattgaaaactttttaaagacatgaaatttacatcttctcttttttataaaaaagctgatgccaaagagcatcaatatgtgttattttaacttctattaaacttacattcattgcaaagtttctacagaccatcagaaattcaacagaaaaatcagagaattgaataaaacagtagcttcacaatctgtaagtactatttcacgtttgttctgtagagacacacacttaaggatagttcacttttctatggagctacaaagagtttgattatgctcagaacttatcattagctttctttgatgtgaagaagtataattaggtactgtttgtgttgctggggacctatctaatatcatttcaacggttcaagaatgtgattagtaaatgtgtgtaacatttgaccatatgcccctaccgccactaccaatacccgcacagggtttaagtctgttcagtaaatcctcattggttttaagccttagatctcatcactgtaaatacccaaaacaatcaactcacaaagaggaaagatttaattgtgctcacagattcagcagctgttgacaccatgcattggacccacagcaacatgttatggtgggagcagtgtttgagcaaaaccattcaccccatggctgccaagtgaagggcaagaggaaggaagcaagagcccaatggttctcattgtctgtctatgcaaaatgacataacttccttttaccaggccactgtccaataattattcaaactcccaaaacatgtcacaagttgacaatcaatgctttggcatagggacttctggaggatactcatctaagtatatcattggtctcagtctaaggccctttgatgacacagagagctttcatgtctgcctttcctggctcttgggctggatcactggccaccaggctattatttttgtcctagcatttgcaaatcatacatagaatcgaaggaaaaaatcctatcagtcgtttctcctgcccattgttacatctttccccaaatgttccacaaagacagagtgtctggaaaatccccatttacccttcaaatttctgctctgaaaccttggaagcctaccctgtttagtgtgcaaatagatccagcatgctgctttttgttattgttttgagggatttgggtgctatttctgaaccaaacacagttctattatctaagctttcctcctatatggtaattatttatttacatgtctgtctcctgtctgaaacctgagctccttgatggcaaactaacctctgccttccctctgccagagctagacacactgggttcccagaacgtgtaaacttctccattgggaagacatttttacacagcattaatatttgcttatatcactatcaaaacaaaagaaaaaagcagacacaatggaccacctgaccacccacagtggccacagcttcatctcatggttacatgactagcaatggttgtgagcatggtaaggaccaaaggaaatgtgggccatggaatattctgaaaaatataaccattagagacatggaaatcactaccatgcatgtcttggtagttaaagttggaagagagaggctgttggcctaaggtacttgataccctgagtctttctggaatcgactgagttaggtccactttcttccaagacacctttgcagagtgtacaggtatctgtgatgtttgttgttgggccaagtgaaggcttttacccacttaattactcacagttgattacatgattacaaatttcaaaattataggcttctgttttcacatagatacatagaatcgaggtcaatatcacactggagtttggaagcaaggcaccacacagtagttcccacaggctcagagtcttgggaagctaactagttccctctattctccagagtataactattttctaaagatattccctgtttcaccaataagaataatcactgaggactctcccccctaaggtgttattttgatcttgggaattaagctgtaattgagcagccaagaaagattctgctataaatgttaatgatgaagccagcttttctaatgaactttagctggtgaggggggcaggcatcgagaaagaggtggcagagagttggacagtgaggacggcaatgcccacccctttcatgtccacatagaacttcagaatgcagcttttaacaaagcaaatatttgcacatgtaattcattaaagatctccaaatgaaagcatttttgacttggcaggtaccacaaatgcaatcatggctgtgtttcaaagggggagaacacagcaggctgccatgtaaagagagctaagtttggaattgagtctctcaagccaacaggcgcacagggccagaagcaggaagagctaaggagatctctctccagagtctgcacggggagcgaggtcttgctaacacctcggttttaacctccaagtctccaaaatgtggcagaacccatttattaatttcttctattttgtgtaataatttgggaagtattactattagctcttctttgaaagtctggtagaattctgcactaaagccatctgaccctgggctattttgggttagagattttaatgatgtcttctatttctttaggagttatgggtctatttaaactgtttatctgatcttgatttaagtttggcattcagtatctaccaagaaatttgtctgtttattttatattatccaattttatggagtacatggttttgaagtataatctaatgattctctgaatttcttcagtgtctcttgttaagccacccttttcatttctgattttgttaatttggatattccctctgccttttagttggtttggataagggtttgtttaccttgttgattttctcaaagaaccaactctttgataatttattgataatttgtattgttctctttgtttccattttattgatttcagccctcagtttttttatttcctgtcatctactcctctttggtgtgtttgcttccttttgttctagagctttcaggtgtgctgttaagtcacttgtgtgagatttctccaaattcttcatgtaggcccttagtgcaatgaagattcctgtttgcaacactttcattgtgtcctataagtttggatattttctgcattaattttcattgaattctaagtagtctttaatttctttctttatttctaccttgacccattggtaattcagttgagaattgctcagcttccatgagtctctaggctttctgtagtttctgttattgttgaactctacctttaatccatggtgatttaataggatacaggtttatttaatttttttaatctgttgaggcttactttgtgaccacgtatgtggtcaattttgaaaaggtttccatgaggtgctgaggagaagctatattcttctgtgtttgggtggaatattttgtagatacctgttaggtctatttgagccataatatctgttagttctgttatttgtgtttaatttctatctagatgacttgtctattggtgagagtgagatgttgaagtcttccactattagtgtgtgaggctcaatatgtggcttaagctttagtaatgtttcttttacaaatgtgaatgtcatcgcatttggggcatagatgttcagaatcaaaacttcatcttggtggacttttcctctggttagtattcaatgtccttctccatctctttgattaattttggattgaattctattttgttacatattaggatagctatagcagcttgcttcttaggtgtgtttgattgaaaagtctttctctaaccctttactctgaaataatgtctatctttgatgttcaggtgtgcttcttgtatgaagaagagaactggatcctgttttcatagccactcttttagcttatgtctttttattggcaaatgattccattgatattgagagataaaaatgaccaatgattattaattccttttacttttgtggtgtgtgtgtgtgtgtgtgtgtgtgtgtgtgttgctaactcccttgggttggactttttcttctagtaccttctataaggctggatttatggataaatattgtttgaatttgacttttatgaaattttgtttatgttatcttgttttctccacatatggtgactgaaagttttgctacatatagtattctgggctggcatcaatggtctgagagcctgcatgacatctgtccagactcttctgacttttagtctccattgagaagtcaggtataattctgatagatctgcatttatatactgaccttttccctttgcagtttctaatattctttctttctatgtttagtgttttgattatcatgtggcaaggtgcctttcttttctggtccagtctatttggtgttttgttagcttattatacctttataggcatgtccttctttatattgggaaaatttttattctatgattctgttgaatatattttcagggcctttgatctgggtttcttcttctattcctattattctttggtttggtcatttcatagtgtcccacatttcctggatgttttgtgttagtaattttttagatttaacattttctttcactgatgaatctgttttctctagcaattttcaacacctgagattctctcttccatcttttgaattctgttggtgatgcttgcatctttagttcctgtaaacttacccaaaatttccatttccagaattcccttagtgtgtgttttctttattgcttctatttccattttcaggtcttaaatcattttcttcctctctctctctctctctctctctctctctctctctctctctctctctctctctcttcctttggctttcttggcattctttaagggatttattgatttcctcctattttttatttgtcttctcctcaatttctataaggcattgtttacttcctctttaaggatctctatcatcttcataaagttattttagaggtttttctcttgcacttcagctgtgttggagtgtcaggtctttctgtgatatgatagcttgattctggtggttccatattgccctttctgttatttattgtgttcttacactggcatttaggcatctagatttgggatggttataggtctagttgttgattcctccatttgtatgtgttgggtgggtatttcattctttggtttctgtttcctctctggtcttctggcctaagtggccaaggattctggtgactagctagtcttaggatccagtagggtgtctctgctggggttttttaggccttgggtccctagatacagcctggtctctgctaaagccaagtcttcttccaaagttgtatgccagaatatggaggcaaagggagggagtgctggggtctcaaggaccagcctgatctccagtaaagctgcctgtgctatggctggaatatggagcccaggggaggggatgtattttttattattgagcttctttaaatgctttttaaatttcgagatagaaaaacattcgttgcagattttagaaacattacttgcaatttagaaaaacattttgaagttatgtaaaagagcaagaaaagtcagggtgaacctagtattttattccaaagaagttgtttaagatgtgttttaatttaaaaagaagaaactgatgccacgattattaccacgattcctttgaagcatctccatttgtgaactgatctggctgttggttcgtttgtgggctttgtgcctataacttgtggacactgtgtggaataagaatggcaaagcagtactctgagaacttgtcagagattaatctgctaaggaggtcctggagaagaaagttccaggtgttttatagtagagaaagtcaacatgactgtaatgcggtcactgagtgaggccagtcttggtgcttttcagtcctctttgtttgtgttgcttgggcccatccttagtcatcttgacagtcagagagagagagagagagagagagagagagagagagagagagagagagagagagagggcttcatgaaactaccagattaaataattctttaaaaatcattaatccattcaaaaatgtttactcatcatatcctagacactggcagtctgcattcgtggaactcttcccagcctgcttcaagacagggactctctatttagcctgaggtggaatcactttcacagtcttcctgctcccacatcaagagggctaggctgacagctgtgcaccacaatgcctggacacccgtcttccttagaaccaacctcactgctgaatataagcatgggaatcacaccttttgttaaaacatctttttttgtgatataataactgtagatttcacgcttttaaagtgccatatttagtgggttttagtgatatgtgctctttgtttcttgagaaagaaaccctattcactgccatcactcccctcttcctctttgccagtacttggccaccaatacttgactttctgtcatattaatctacctactgtgatcatttcctataatggagtcactaaagtgggaaattaccaatatggagcgaagtagaaatataagggtatttagtagggaaaagcctaacttacagatgacctagccagctggcgtggcagcagtctgcacagcaagtaccaaagtgaaaccgaaagtgcccagccacctgaccgcctctcactctacttcaccctaaccacgccctcacaggcgtggtcagacacacctgtagccagcccctaagtaagcgtggctacagcttcccctacaagtcacaatatttgtctttttatttttggcttctttcacttaacatgttggtagggatggttcacatttaggattttacatttatttggtgtgtgcatgtgcatacacacacatgccaagacacacgtgaggagatcagaggataacttttaggagtcggtgatctgctgttggctccaggaactgaactcaggtcataaggtttgaggcaatcacctttacctgatgagctgtctcgccagcccatttcatgccttccatgcctctaatgtcaaaaactatctcacttacaggtataccacattgggtttacccatctaccagtcgatagttcctagagttgtttccattttctagttcttatgcataatcttccacgaacagtgcatatgtgcactttgtacagacatatgcttgcagttctcttgtgtgtatacttagaagcggaactcctgggccttatggtgactctccagcatttttaggaactgtcaaattgtccaaaccactttacatactgtactagtttcaagtctgttgtctgtgataaaaatacccccaacaaaaagcgacttaggggagaaaatgcttattttagccccactattccagtttatagtccattactgtggggaaatcaaggtggcaggaacttgaggcagccagccccaccccatctaccgttgagagtagagaaaaacaaatgcctatgctgagctccatttctctaaccatagagttcaagccccctctggctagggaattgtgctacctgcggtgggctgggttttcacacatcaatcaatggaataaagacaatcccctacagacacgttcacatgagactctcttccctaggtaaccctaggttgtatcaagttggcaattaaagccaaccatcacataccactttatatcagtacccgtaatttgtatagattccagtttctccatatctttagtaacaagtgttcatattttttattatagccatcctactaaatatgaaataatttcttattgctatgttattcagatgggattttgctatgtaatgaggttagttagcctcaggctcacagtcttccagcttctgacacttcgatgccaagatttcaggcattcatatctattcttgtcttttgttgtgattttgatttgatttctctgaccaataattttctcagcatattaataataagcatttcacatatattctgggagattcttcaatgtgtttcaaacgttatttattttatagtctacatctctctaaatgtaagctagcacatagttgggatacaatgagagagaaagaatgtctatatttgatttttaggaatattattctttcagccctttaacaaaatgtcctaaatagctattgcatattataaatattctttttaagccatcacaacacacattgatggatatgtatgtataaacggaaaaatatggattctttaaacacatttaaccattatactatctgaatatttaaggatagcttatttacctttatttttctcctcagaaattgattgtggagaagtaatttgtccgggatctttatggtaacaaagtttaactcacaggggttgggatctatgcttcagtcacattgattatgaggtcagacctctcagagctgggctttgtggacgccagaggcagatacgcatctcacacaggcacctgtttcctggaattagagatcacaagcgatatgagcttctttttgagggtatgttccttcctgggagtcagacgccattcatcacaccacagattttgctgtctgccgggatctaggtaaaatggtttttcagagcttaaggaatttctttccctgtaagtatttcatccacagtagccagctcagttcagagatctggagaaaagcacagctccgtgtgctcacaatacccagtcctgttcctcatgactccctgtgttaattccatggttgttccagcaaagtcacaatagatgcccatgcttgtgatggtgataggaggtgaactgagaatctgggagaatccgcacactaaaaagtttcagagaagagcacttgttgacagtatacttcaaatgtcaaaaaataggtgccagcacacagtgaaggttgtagttcatttgtcataacttcaggagttggtgaaataattgtgtacagacttccgtgtgtaaatgttcattaaagtatggcttatgacagaaaatctcacaagcaacaaaatagtccaagaaggaattgacttaacaaattataaccacatttacctgtgctgaagaggtaaaagtaatattagagaggtaaagggttaaatctatcctataaaatctatctatacaacagaggaaaatgtcaagatataggaattttaaaactctatcagaaaaattggcacacagacataggggagaattttaaattctgagtgatgatacgaaagttttaatatgctttttatgttttttgcacttttaacattttataattaaaaatatattattaaatagtgaatcactttaataactaaaaagagaattcttattggtgcatcatacaggaagagacaacatttttaataaggctgatttcttttagatttattatagtgtgcgtgcgtgcgtgcgtgcgtgcgtgcgtgcgtgcgtgtgtgtgtgtgtgtgtgtgtgtgtgtgtgtgtagtacggatgtagtacacatgttgcctgcatgtgtgtctgtgtaccagtgtgcttggcacctatggaagccagatgatgtcagataatagcaatgggctcacaaatggctatgagtcaacctgtggaagctggaattgaacctgggtttgctggaagaacagccagtgcttctaaccactgagctatctcccaagcccttcccattaaaattttaaagtatgtgtgagttggagggattgatgtggaatgctgggtgaatttctgttgctttagttttgtgtttccctaaagaacagctcctgcttaggtagtgttgttatgctctctcaacccttactctggtccctgagaggagtggccaatctgatggcccagtcttctcctctaggttgtctctctcatctcaggacacattctgatttactccctatagtaatgtccccaaacagacagtgtgacattgatgaaagaacagccaaagaaaccaatagaaacccagaaataattgtacaagatttgcactttttctttgacagaggaaaagcaatagaatagagaaataagtggtgtgggaacatctgggcattcatatgcaaaataataatagtgataataataattattataataaagattctaaacatagactaacatggtattttaaaaaatcaactctaagtgatagacataatgtaatatgaaagtataaaaatagatgctaacacactgagaaatctaggctactttagttacggcattgaattttaaaatctatacccaaaatcttaatttacaacagaaaaaaatctaaattgaccacttaaaaggtaaaacttctgctctattgaaagacctgttaagaagataaaaagataagcccctaactgggggagaaatttgcaaagcacatgattgataattagtatctaagaacatcaaataatgtttaataatgtacaacccaattaaaatctgtatctgtttcttatagtcacatgctaattaacctattaaataactatattaaattaatataatattaaattaactaaccattattattgatgttatataatgttctaattagcttggttttcactgagggtgttatttgtttgtgaaacaggatctcaggtagcccaggctggccttgaactcactatgtagcagaggagaactttaatctctcagtcctccagcctccatctcccgagtgctgggattacaggcatgcaccagcacacccaggcttatgcaatcctagaaatcaaatctagggctttgtgaatgcaaggcacacagtttacatgccaagtcccaagtttttgtaaacttggaagagtgagaagttacgctggctacaggcccttccccacagactcctttagggagatgtgtagagaaggataaatctcaggtaagtctggggctcctatctgaagtctgattggagacggtgagacgacttggtaggatcactctacttcactcccatgcggcaccttaaactgtagagatagaatctccagtgaggaaattcgaaaggttgtttgatgagaggagacaaaacaggccaattctggcaaagtgaaactcaaggattgctttactctgtgtggctccttggctctgccatttgtaatctaggtaaactttgccaagtggttcaacctctggggcctttgatgtttgtaagtgtgtaaggagtaatgattatgaagaaaagtcaaccattttctcacacttcctgacttgttcaaaatccatagagtcctgggtaattgttggggtgggacttttatcttcaatatctttggggggagggaagtgtatcgggttcttttcctgttgcctcaacctactatctaacaagttgaaacttcaaggagagaagacaaaataatttgcctcacatctcacagtctgagggtgcagtccatcgtggcagagaaggcgcaacagtgaagtcgcacccggctgagcaacaggactctgagggggctgctcacatctcaggaaatcaggaagtagaaagtagacaggaatctgggttgggctaaaaacctctatttcctccttcctcagtggcttacctcctcctgtgagacttcatttctcagggggtctatggcttccccaaactgccaccagcccagtacacatgagtctgcaaggtattccaagtatttacttatttggtgcctctctctctctctgagtttctctctctctctctccctctctctctctctctctctctctctctctctctctctctctctctctctctctccccttccttccctctccctctccctgcctgtctctgtctctgtctttctgtctctgtctctgtctctgtctctctctctctctccccttccttccctctccctctccctgcctctgtctctgtctctgtctttctgtctctgtctctgtctctgtctctgtctctctctctctctctctctctctctctctctctctgtgtgtgtgtgtgtgtgtgtgtaggcttgtgcatgtcatagcacaagcgtagcgttcaaaagacaaacctgaatattgttcttagttcccacctgcttccaaagaaacagggcatctctgctgatttgccactgtgtacagcagactagctggccctccagtttccatggattctcctgtctcctctgacatcaccataggaaagctgggattacagcactagtgcctcatctgaatttacatatattctggggctctgtacccagcactcagacttgtgcagcaaacatgttacccatctgagtcatctccccagcccactagttgtacattttaaataggctaaatgcttgttcatatataagaagtgaagagccaatactaaagtgaggcttgtctgccatccaggcttagctgtgttgaattgcatgtacttagaataaaatcaatctttaattgtagggctggaaccaaaaacactaattaggtgaataactaatttgaaatactgtagatgcagtactggaaaatagttaaattcaacatctgtctttggacagattttttgaggttttcaatgtaagccaacaaaaaatttctaagtaagatatgccagctgtgtcttttaatgaaccacaaacattttcttttttttctcctatctggggtatttatttaaaaagaataacattgttcaagtaatacataaaccatattagtattttcagggtacaactggaaaatttttgttgttgttgtttttgagacagggcacaacatagccaaggcattttaacacaaatacattaatattaaattaatattaatttagcacacactgttaatattaaaatcactttttttctgtcccatgggtcagtaaaccaatctcagagcattgttcgccatacatactcagaggataaactcaaaagaccatgtgacattaactagctgaagtttcatattaattaaagtctgcatttgaggaactttgtgaagaacttaaggtgggacaggagatgaattttccagaagtttccatgggaaactttggttccacatttaacaaattaccaatagcctccttgtccaccatgccttccttccatcccaagactgaatttggagatgaaaggaggagttcttcttttgttctttttaagtattaggcatgatattgagaatctgcatcaccaagggtgacaataaacattgcaaagagacgcatatgctcctggggtggtcaggagactaacaataagtgttatttgaatacattgtggaaatcctggagtacaatatcataaagacattcttgagagggaaagtcagtgacttatagtgttctctgtcatcaagcaacctatatagtgtcctctgttgtcatgtgacttgtgtagcgttctctgtcatcatatgacttgtatagtgtttgttctctgtcatcatgagacttgtatagtgtcctctgttgtcatgtgacttgtgtagtgttctctgtcatcatgtgtcctatatagtgtcctctgttgtcatgtgacttgtgtagtgttctctgtcatcatgtgtcctatatagtgtcctctgttgtcatgtgacttgtgtagtgttctctgtcatcatgtgacctatatagtgtcctctgttgttatgtgacttgtgtagtgttctctgttgtcatgtgacttgtgtagtgttctctgtcgtcatgtgacttgtatagtgttgtctgttgtcatgtgacttgtgtagtgttctctgtcatcatgtgatttgtgtagtgttctctgtcatcatgtgagttgtgcagtgttctctgtcatcatgctgtgaggattttacactggggaggagataaaaaggtgagatgacagaacccattgagggttagtgtgttgagagaatataaaatttataaacagtactattcagagacaaatggccagagtgttcttgttctataagacataaaggaagctcagtctacattttgacagaagatagtagcatcatcattttgctcagagatcagtggctggctggccattgctctcctctgctgctccagagatgtcccaatcataacactggctcaccttccactgaattctaaagagggctatttttaggctctccccctctctgactacacaaggccttgaggatgagagcacaagatctcaaccaaggactgagggggagcagaaatgaaaaattaggaagaggaaacaaattattgtacttaaacattcttcagagtttggcctccagtctagtttggattgtgacaatttttttaatgtctgtattttaagagggtaaagataaatagcaaagaaagtcagtaaatggagggaactaaactcagacaaaaggctaagcaaagtgtggcagccatgaggggtgtttggagtctcagtgggacctctccatgagagcagggggagctggctaagagcaggggtagctggctaagagcaggggtagctggctgatgctaaaggccaatgcaagtcatctgcccatatgtgcttgggtatgaggggagagacagagccacagagtaagtaagaaggccattaaagtgagtgcctagaggggactggatgccaggccttaccacaagctgtgatccagctctaaaagaagaaaatggaaagatggaaaatgagagtctagtaaaattcttatttggatctttttcatcttagaaagagaaacaaactgatggaattgctcattatttgcaggtccataaaatattatatggagaataaatagtactctggatttttttccctttctttttttaattttatgtttttaattgaattaaggtggttcaattaggccaagtaggagaagactggctacaagtttgatcaaatcctgccaaagacaactgtgatatctcccttccaggcattttttaaagaacaggtagcctgatttgaattttaatttatgtaaagtgtgagattgacctagatgacttccaggactatttctgaacctacattttgtaattttaagaaagagaaggcccattctgagagcccagcagttagccaaggagaggtctttcttgatgaagacacagcctgtgaactgtgaacttgtttaattgcagggaaatcatttaatccggaacagaagaaaacaaaatgcactagcaaacaggtgcatggtggcaagtctcttatttacagatttacagaaagtaggcccgggtttccttcaaccaaagaatttgtgaatccagatctggagataaaaacaaaaaaaaaaaaacaaaatgacaagctgtttgttgcttccacaatattaacccattgtctgtaactcttcttcattttctggcccagaagggacaacatctgattggaagcaatagaagcaagtctaggagccaggatggaagagtctagtgacgtgacaacggttatcacatgaggagtgtttggcagaaagtaaggaagtcctgacctacaatagcatatttttcttattgaagaagtaagtagcttctggtggtggtccaacaactcaacaatgccagagattatatttctctgtttccattgacggctttctctctctgttccaagatgactttttcagagtcagccatatgctagcgtctgagataggatgaagccaattaggaagacagaaccatgccagcagccagatttgtttttgtttttgtttttggtggaaggaacataatctttccaagcacagttctgatagcttcatgtggtaatttctagttgcaactgagactaggaaatccagcatcatggtcaccatgatgggctatgttccctcaacctggagctttgagtccctggcagtaacgaagaatggaagtgggcgttcttaataagcacaggcatctaccaatcaatacagtaacttggaaggagtaaagaactagctgtggagtcccggctccatccaccagcacagggcggcgcctccatccaccagcccaggggggcgcctccatccaccagcacaggggggctaggggctgtttctgggaccctgcttagaggcatctaatgctaagggtttgctcaccagatccgagatcagcagtgggatctgacacacccagacactgccgaggccccagtggtggcagttctgcctccatccacgacaagatgacagacatcagagtattggaactgtttgcatctaccagaagggaaccttgggcccatacccaccaggagaggaagagactcctgctacacccaccagaagaaagaatgagaagaggacaaggtaaaagcatattcaacaacagaaaacccaagatgataccaccggagactaggaaccatacaccagtaagacctcaacatcacaatgcagatgaagcagaagagaatgaccttaaacacatcttcatgaaaatgacagagggcctcaaagagacatgagaaaatcccttaaagaaatagaagaaaaaacaaaccaaaaaacacaagatatcaacaaatctctcaaggaaacagttcaagacctaaaaactgaaatagagtcaataaagaaagcacaatctgagggaatgctggaaatagaaaagctgggtaaacgatcaggaactacagatgcaagcataaccaagagaatacaagagatggaagagagaacctcaggagttgaagacatactagaagaaatagaatcatcaaccaaagaaaatcttaagtccaacaaatccctaacacaaaatatccaggaaatatgggataccatgaaaagaccaaacctaagactaatagaagaaggtgaagaaatccaactcaaaggtgtagaaaacatattcaacaaaatcatagaagaaaactttcccaaaagaatgtatgatgtgacaacccttaaatagtacaatagccagaggaacttatgtgacaccaaatagaaacagattctaacgatggtaaggacttagagtttagctcagaattcaaatgtagaagagggctttatgagtgatccagccattgtcttgggcctcagtttcccaacttagggcactgatgctttgttcagtgcccagcagacctggctatgacctgaagggtgcttactgaagaataaaactaagagcaatgcttttcctgcccacacttcactttgatgaggatgactgaagaaaatgactgtgcctaaattcagctgtgttttacaatcttttgcatgccttcctttaattcagttttatcagatttctatagcctctgtagtaaaagaatctgactgacatccttttcaatacatccttgaaatccatgcctcaagccctaaagcatttccctaagagaatgaaacattgttctcctggattagacaatgctaccacactaggaaggctactacaaaagctttggggtatctgcaacataattcacttttcaaaggggatgaactcttgaaaacaatattcctgggaaaacaacattggcttccttcctcccaagatcctccagaataataggaggcatatttccctaaagaaagatatgccaataaaaatacaagaagcctacagaacaccaaatagactgaaccaaaataaaagatctcctcggcacataataatcaaaacaccaaacatacagaacaaagagaaaatattaagagcagcaaaggaaaaaggtcaagtaacctataaaggcaaacctatcagaattacacctgacaattccatggaaactctgaaagccagaaggtcctgtatagatattctacctgaacgaagagaccatggatgccaggtcagactactatacccagcaaagctttcaatcaatatacatggagaaaacaagatattccatgacaaaacaagattcaaacaatatatagccaccaatccagccctaccgattgttctgaaaggaaatctgcaacccaaggaagttaactacaaccagaaaaatataggcaataagataatcccattttaacaacagccaaaaggaaaaagggatagaatcccacacataattttaccaccaccaccaaatcaaaaacaaacaagaatgaacaatcaatggtcattaatatctatcaacattaatggtcttaactcccctataaaaagacacagattagcagaatggataagaagacagaatccattcttctgctgcatacaagaaacacacctcaacttcaaatacagaaggtacctaagaattaaaggttgggaaaagattttccaatcagatggacccaagaaacaagcgggggtagcaatcctaatatccaacaaattggactttaaactaaaatcaaaagagatgaaagaggttacttcctactcatcacaagagaaatccatcaggattaaagtctcaattctgaacatttatgccccaaatataaaggcatccacatgtgtaaaagaaacattactaaaactcaaatcacacataaaaccgcacacacttatagtgggagatttcaacaccccactctcaccactggacaggaacagcagacagaaacttaacaaagaaacaaaggaactaatcaaagctatagcccaattggacttaacattccatccaaatacaaaataatttaccttcttctcagcaccacatggaaccttctctaaaatcaaccacatacttggcaacatagcaaacctcaataagtacaaaaaaattgaaataacgccctgtatcttatcagaccaccatgctttcaagttagaattcaacaacaacacaaattacagaaaacctacaaactcatgggaattaagtatcacccgatttcacaattcctgggtcaaggaggaaataaaaaaaattaaagatttcctagaactcaataagaatgtggacacaacatacacaaaccgatggaacactatgaaagcagtgctaagaggaaaattcatagctctaagtgcccacatgaagaaacaggagaataatcacactaaagaattgacagcacaactgaaagctttagaaaataaagaagccaatacaccctggaggagcagaggccaggaaataatcaaattgagggctgaaatcaataaaatcataattaggagaacaatacaaagaatcaatgtaacaaagagttggtttttcaagaaaatcaacaagatagacaaacctttatccaaacttaccaaacagtctagagtgaacatgcaaattaataaaatcaggaatgaaaagggagacataacaacagacacagaagaaatccagggaatcataaggtcatacttcgaaaacctatattcctcaaaattcaaaaatctaaaggaaatggacaattttctgggcagatttcactttccaaattaaatcaagaacagataagcaacttaaatagacccataacccctaatgaaattgaaatagtcatcagaagtctcccaaccaaaaaaagcccagtgccagatggcttcagtacagaattctaccagaaattcaaagtacagctaatagcaattctcctcaaagtattccacacaatagaagcagaagggtcattgccaaactctttttatgaggcttctataaccttgatacccaagccacacaaagacacaactaacaaagggaactacaggccaatatccctcatgaacattgatgcaaaaattctcaataaaatactggcaaatcgaatacaagaacacatcagagaaatcatccaccatgatcaagtaggcttcatcccagggatgcaaggatggttcaacatacaaaaatccatcaatgtaatccaccatataaacagactgaagaaaaaaacatatgatcatctcactagatgccaaaaaagcctttgacaaaatccaacaccctttcatgataaaggtcttggagaagtcagggataacaggaacatacctcaacataataaaagcaatatacagcaaactgacagccaatatcaaattaaattgagagaaactcaatgctattcctctaaaaccttggacaaaacaaggctgtccactctctccataccttttcaatattgtccttgaagttctagctagagcaataagacaacaaaaggagatcaagggaatacaagtcagaaaggaagaagtcaaactctcactatttgcagatgatatgacattctacataagtgacccgaaaaactctaccagggaactcctacagttgataaacaccttcagcaaagtagcaggatacaagattaactcaaaaaaatctgtagccctactatatgccgatgacacattggtggagaaagaaatcagagaaacatcactctttacaattgccacaaacaacataaaataccttaggtaacactagccaaaaaagtgaaagacctgtactgtaagaattttgagtctctaaagaaaaaaattaaagaagatacccgaaaatggaaagatctcccatgctcttggataggtaggatcaacatagtaaaattggcaatcttgccaaaagcaatctacagattcaatgcaatccccatcaaaaccccaacacaattcttcacagaccttgaaagaacaattatcaactttatatggaaaaacaaaagacccagtatagccaaaacaaccctgtacaataaaggaacttctggaggcatcaccatctctgacttcaagctctattacagagctatagtcctaacaacagcttggtactggcacaaaaataggtatgtagaccgatggaaaagatttgaaaactctgatattaacccacacacctacaaacacctgatttttgacaaacaatccaaatttatattctggaacaaagagaacatcttcaacaaatggtgctggcataactggatgtggacatatggaagactacagatagatccaagcctatcaccatgcacaaaacttaagtcaaaatggatcaaagatctcaacataaacccagccacactaaccctattagaagacaaactgggaaatacccttgaattaattggtacaggagacctcctcctgaacattacaccagcagcacagacattaagatcaacaattgatcaatgggacctcctgaaactgagaagcttctgtaaggcaaaggacacagtcagcaaaacaaaagggcagcccacagactgggaaaagatattcaccaaccccacatctgacagagggctgatctccaaaatatacaaagaactcaagaagctagtctccaaaacaccaaacaatccagttaaaaagtgtcgtacagaactaaatagacaaatctcaattgaggaatttaaaaaggctgaaagacacataagaaagtgttcaacatccttagccatcagggaaatgcaaatcaaaacaactctgagataccatcttactcctgtcagaatggctaaaatcaaaaacaccaatgacagtttatgttggagaggatgtggagaaaggggaacagtcctccactgctggtgggagtgccaacttgtacagccactttggaaatcagtatggcaactcctcaagaaaatgggaatgagtctaccacaagatccagcaattccactcctaggcatatacccaaaagaagcacattcatacaataaggacatctgttcaactatgttcacagcagcactatttgtaatagccagaaactggaagcagcctagatgcccctcaactgaagaatggatagagaaaatgtggtacatttacacaatggagtactactcagcagaaaaacaaaaacaacaacaaaaaaaaacagtggaatcttgaaatttgcaggaaaatggatggaaatagaagaaaccattctgagcgaggtaacccagtcacaaaaagaccaacataatatgtactcactcatatgtgtattttagacatagagtaaaggattaccaacctacaatccacactgccagagaatatagtaaacaaggaggtccctaagagagacatatatagtcccctggagaaggggaaagggtcaagatcccctgagcaaattgagagcatgggaagatgggggaggaagctatgggaatgagaagggaagaagaggaagatgcagaggtcatgaagagtatgctgaaagtttgagtcaggggaagaatagaagaaaggatatgagataggtagggttttagttgggggggtaggggaggaagggagggagaagggaactgggattgtcatgtaaaacaatcttgtttctaattcaaataaaaaacgacttttaaaaaagaactaactgtagatggaagttaactctattgttcattgttttgaaaacttgagcatctctggtaaagttagctattaatctttatctgtatggctgttgggattatgtgtgaggaaagtctaaggaaaatgctcaagggctaggaaataacaagcctttagtgactgtatatgacagagtaacacctgacaaaagggaagaagggtttcttttggctcacagttcaagggtacacagtccatcatggtgggggaaggcatggcagcaggttggtggctggtcgcatttcacacaccatcaagaagtggagagaaaagcttgtaatcagctgtctttcttcttttccttcagagcagtagcccaacccatgggactgtgccactcacacagctagggtcagtttcccaacgtcaactgacctaagctagaaactccgtcatgaacattaacaacattaacggacacagcagcattagtctcatagctctggcccatggtctttttatgtggaggacatttctgaggggagaactaactttttcaaagcccaaagaggtcagctgtgaactggtggcatttggaatgacagagtcaaggcaacttctgcaagcagatgggtgagccgcactgatgagccactgactttatctgttccccatggttaaaagaaggagcctgttatcaatgattgacatttagaatgtggaaaattcctgaatgccttttgatgcaccttacctcccaacataatctgtatagtgaatctcataaccataggggatagcacaagccagtaaggttgagttcaaaccctaaacccaccgttcatcagctatgcaataccgaggagtttatttaacctcttcgtgcctccatttcagtgttttaaagggtgataataataacagtaaaagaaaagtgaataaacgtttaaaagttcttagaggtgtcacgtgtgtagaattgcttggggccatattagaagcagttacataaccactgatccaaaaggcccatactgtcagtgcagcaacaggagaggtaaacctgtaaatcattaccagggggaggggtgatcctaaagacaaatgttgtcctgctggaattatgtttccctgagcttatgcggggcaggctgtgtagaagatttttgtatattggcttgctgtcattaaaataagaaaaatccaggaaatttttctccctgctttttcttacgtggaaatgggcacctgctcgtcctctgagagaagattctacaacagtgtccctctgtcaatgctggcctgtcatgacataccatattttcttgtcattctacctgcctatacttgctcagtcttctataaccccagagtcaccagctcggtcctcaagtgctgcctccagcacttgagtgctggagcaaactagtagtttgctcaaacagattcccagaccccacatacagtgtccctgacagaggacaatccaagaacatacacttctaaatgattcatggacattggtgacccgtttgtttgtttttaagaaaacatgactcaaaacaaatccacaatctgtacttttcacaagtacaaaagttattccccagtcagaccacaagccactggaggattagagatttgtctgccatctttgcccattgttcaggaagtggtttctcaaccagtccaatattaaaatgaaatccaagtggatgaggtctggtttgtctttgttaaacaaacaacagtgctgactgatggaggaccagcaagaatgtctctcagtagtgcatcgcttcagttaaacaatcaaaatcccttccttaccaaacagacacacacacacacacacacacacacacacacacacacacacacctaccattatcacagctgaaactaacacctttcttttgcagaaaaatttctttcaatgatacttgctagtagaggccccaatagaagtttaagttctctgccagagagatgtccacatgggaaggtctacaatgttggttgcttgtcaacctaagctttaaaaactgtcttttcttgaaagcatgcatggaacagaatacctactatctcagtctacatggactgcttaaatatttctttcatgatggctggaaaaaaaaccagaaaccacacaactgaaaataaagtaacctatgctacctgagaacataggtaagcatacactgacatatgcctgatgcctgctgatgtcagaagagggcatcgggttccctggaatggaatcaacaggcacttatgagctgtcatgtatgtgctgggaattgaacctatgtcctctgcaaatgccgcaagtacacttaacctctgagccaaacttccaggcccctgattgccttgtttcaaagacatcaatacattgcctagctcatgaagttgtaatgagaactaagtgatgaaacacatttgaaactctgaacactgagtgctgatttaaactctggacaaatgctgatgacatgaacattctaggcaaggcgcaatgggggtgggttctacaaatctgtagtcaattagtgagttcgtttatattcttataaaactgcattaaatgttagatttataagggacctcgagtcctggatggcataatatgataggggcctgagtagattttaagcaagtattgagtttgcaagagtctggaagattcaggggactttctaggcactcactgagttgttttctttttttgtttttttttggtgtttttttttgattatttttaagcatcaaacaagaagaaagtttcccaatcaataaatgtggctaataataatctcacatttgcttacttaaagaaataaagtatgtaatttactttgtgcagaacctaggtaataaatactcaataaagtgtagctgttattaataaagatcgttctggaaaagtaggaagagcctgaggtaggcagtgtggaaccgcagttcttcacttctctgggtctctaagaataaacaagatgacaagagactttcaaagttcctttcagcctcattctagcttgacatggcctgacgtgcctgaggcttagaagggacatggtaaccttaccttactaacgtccagtgatgctgctgggccctccgccctcttaaacgtcacctccagggaaagcattgaatgtggcataggtaagacatactctcaaactcggtgaacacagagacatgagtgcgaatgttgtctctcaattacaagtttgccacggacaggtgagtcaacctctccaagcctcagctttggggaagaggtataaatgatgcttaatggccgggttatgatgagtagcagagcaaatgcttagagaaatccagccccgttctcgtcacagagatcatttgatacacaatgcccactttagttatgatagttatgcatactttctagtctgagttttgtctcctgagcattgcactgttgctctctccatgtgggcgtgcctgtggctctgcttctcttattctctcaccctcatccatcttccactggcatctccatgtaccttcctctagatattgttccaggtccctcaagaacacagagatatacctcgcatgcttcttatccctctagatttgtgttttgtatctctctctctctctctctctctctctctatatatatatatatatatatatatatatatatatgtatttccatgttgtagggtacatatgtgtgtggaggcacaaaactgatgacagaaatcatcctccatagttcttccaccccatccattgaggcagggtctctcaatcaatccagagctcactgatgtggctagtcttactagtcagcttactcttggagagtcccctgtctccatcttcccagggggaattataatcattttgccgcactcatctagtctttatgtaggtttctagggacctgaactcgagattgtctggtgaattatttaatcactgacccatctccgcagcccctctcaatttacttcctatttttttcatattcttccaagcccactattgccaggtggaagatatgctgtgtgtgtttatatcaaggtcattgaagacaaaattttcactagtgtcactggaatgaagtttttcctgagtgtttgagtaaaagcgaaagcaaaaaacaaacaaacaaacatccacgatacactaattttcaaaaacaggaacgatgaagaggccctaaaagccttgagtcactttcctgtatggtcagcaggtgtggtaaatgtgcattgcaagaataactcccaaagacacagaacttcgcaaatcaatctcatctctttggacttgttcccccacccccaccccgctggcacccagatcaggaggcaggaagctcagataccccaaggaagtgagctgggaggtgtgagaagaaagcttcctcagatgctcacccattagctgctgagaaaagcctggcagccttcaaagacagaggggggcaaaggtgagaagccagctcacccagagatagcagtcaaaccaaccaacccttgattccaacttagatctgcagatgcttgccaacatagttctgtctgagatatcttgggaagaaacagcaccctggattgatgggccagacatgggggttgtggatttaaaagaagcccatccagcctgtctgtcccagactttttggtaaaagttgttttgagctgtatactcagacagtagttaaaagtggcccatgcccaagccaagggttccaatttggaagcgcgagtttgcctagatcttactcagcgcttccacccatgcccacacctcactttgttcctggtttttatgtctttttataccttttcgtagttgaaagttgctttgaagacagaaatcttaaaatgcccactcttaaattctccaccacagctagagaacagctttgcacacggtcccactcttgtcaaatgtgtccaaaactgaccagtaacataagcaatgcgatggcttcagcaaccagggctcctggttttgttgggtatggtagaattgttccaggatatagtatatatacgaatataatgcataatataataatatgcatatacacatatacatacagacagatgggggagggcatgtctatcaaagcaaggctgacctgggttaaagaccctgctcaatcatctttgccaggagacacagcaaactgtttttgcccttagagttcatatgaaggttgaccttgaacttcctgtttctgaaccttggcctctctgaagatgaggggctgtctaaaacaccaacattctctttagttccaatacctgtttcctaataagggttagcttcctacctagggaggtggctcagccactatgagcactggctgttcttcagaggacctagctttggtggccagcatccacctgtctgaggctcacaacaggctacaactccagtcccagaagatctgacacctgcttccggcctccagcaaccccgcatgtgcctggtgcacacacatgcagggaaaatacttgaacacatacacaatgaagtttttaaataatttaaaacctgggaaggttaaattagaaccctggttgtacagttcttatgagaattttgccatgcactagacctccaagcaacaggagccattaagaatactgttttcaatgactgcaatattttcatctcttaacactgcgttagggtgctcagtatgtagccaggcatggctttgaactcctgattcacctgccaccatctccatgccgggattacaagcatatgcagccataaacagtttgtgctgtgccggatattaggcggagggtttaatgcatgccaggccagcactctatcaactaggctgcattcccagcgcctcaactttcattttgcctgagtgctttccctcccgtattgacaaagtttaaattctccaggttttcacattcgccaatggtaccatgcgtgtgatgtcaagcttgagttgcgctctgatcatttgatcctgttacaaatttgtaaattaaaagtattaagatggccttgggaagactgcttatggtgtcagaatgcctgctgctgcatatgcatgaggacctgtgtagggagacactgtagccccgcctcctagtagcccctacaggtatgcctggccacgcccatgagggcgtggtcaggggaggaggaagatgactcaggagagaattcttaagaggccatgaacatgtggatgccccttctctctggccatgctagcttgcggcctctgggcacgcgctggcttgcgtttgggctggtgtttatctgaataaagaaatcttagccttatggactatggatcatctttgagtgcatgcagcacgcaacagaccagagtatcaatatagccagacccagctgcagattcccatagccctagcattgataggggtggagacaggatgacaggccgggcttgctgtccagtcagcctaggtgaagaagctttaggttcagtgagagatgctgtctcggggggataaggaggagagagagtgatagaggcaggcaccaaatattctgctctggcctctgcacatgtacacatgcatatactgcatatatttgagtgtatgtatgtatatatgtatagacacacacacatatatatacatatatatatatatatcatgcacacatatatatgtgtatgtatgtatatgtatatatgtatagccacacacatacacatatatatgtgtgtgtgtgtgtatatatatatatatatatatatatatatatatatatcatgcacacatatacctccacacaaactaaattaacaagattaaatcactttaaaatgtaagaaaatgcatgtaatgtatactaaatttttctgtggctatatgaagtattgtagggatctcatagaatagcagtgtatgttattacaaacagacatctaactgaaaccatgaaaccatgaaagggttcattttggctcacaatttcagagggttcagcatgaggtcgcatcagcctgtgcacctggagagaacatacggcagccagagtgtatgatatcactcattcaaaccatgaacatggaggagctactgtttagcgagccttactccacgtccttctcctttcaattttttacattgtggcttcttaagcaccttagaccaagcagggtattagctccattttccagatggagcaattaaggcccaaacaggttccagaatttgttttgaccctgtagagagctgcagaagtatgattttgagtgggtttctggcttcaaagggatgccgtgtgagggcttcctgacatctaaaactttcacagccaggatcagtctgcatcagctgcctcactctgaaaatttgccctgcctcctccactcagagccactctgcaggatcacaaggctctcttcaaaccctgtgcagagagcccaccatgtgaattattcattttgggagttggataatgcagttggtacatccaacattcataataaacaacaacatttggagcacaggccttcgtgccaggaaagagcctcctttatcttaattccctccccccagtttgtacagcctgctccttctcttgttgaacacaaagtgtgtggtgagggagtaatggaggggtgctcttacagacacgcctttcagtcatccttaactctttcttgtgtcagtggactctgcaaaatgagaaaattagaagattcgccaactccagcacagctttgaagggctgtgtgcagaccttccactttgccctgattttcttatcccaacagtaatcaaatgtaggactcttgtcctggcaggccctaggttaggctgagagtgctatgagcaagagtttgaggctatccctcagggggcttgctgtgccatgggggagatagcatgcccaatagatttcattctatatgtggctttctgtggttgatatgtatgagctgtgtcttaaccaagaagacaagtcatgtgaagacatgggtggggtgacagttaatacacattgtcagcttcttgggttgctatcccctgggcacctctgtgagggagcatctagagtctagattggatatctgagatagggagtccccccctccatttggtgtagatggcaacattatgtggactagggccctgatctaaattaaaaaaaaaagtaggctaacataaaccctctctctctctctctctctctctctctctctctctctctctctctctctcttctccactgcagatgtagtgtgaccagccacctcacactcctgccttcatgtttttcccaccatgctggactcaaactatgatccagactaaaccctctcttcttaagttgcttttgccaggtattttgtcacaattatttccaaaactagctgacacagtaaaagctcacgcaaaccctcggtgttttggttcagtatattgtgactcagggtagagctaatggagtttggtagatgacacactgcattccctggatctttttgttgattctaccccatagcaggagatgcttgagccccggggccatggtaaagaatgaagcagaatttgtagaaatggtagaccagggtattctactgaagacaccccacgaaagcttgggaatcccccttccctttctccactcaatactctgatctaaaaaggggaaagttgggtaaaacaatgaacagcataccttgggcatcctgaatcctgaagactctgtgaaatgtggacttctgaggacttctttttctctccaaacattacagtatgcggccataatcaatataccacccgaagctctagggttcaccaagaacaaaatgcagtgtggcagctgtttccatggacttccctgagtacgtgagaaacaattcaaaatccacaaaagacacaactaggtattaccaatggtaaggagttcagagacgccccaaactcattgaagtttctcatgtggcacagatgtatctgtttttatatattggaggtgatttacttttggtttggggacaggatcttactatgaagtctaggctggcctggaaactcatgggccacaggctgtctctaactctcaacaatccttctgactctgccttcccactgctaggagtacaggtatgagccactacatctgacttgaggagatgatttatatattagactaataaagctgacttttctcttgttttaaattctatttatttatagggtgaggcatgccactctgcacacgtggaggtcagaggacagattgccagaggcagactcttctcctttcttgtgagtctgggaaatcaaactttggtcatcagacttagccactgagccatcacctcatcagccccaaactgtgtcacttggattaatcacatggtgaaggtacttgggtatcagcagaggctctgatatgcccaggggctagaagttttgctaaaccgctaaacatcatccacctgccccttgaataattttcagagcccaatagtgtgcaagacactgctgtggaagcaacctctatggcgtagcaacgtcagatgctgtcacggttgtggcaccaagacataactgacctgacaggaagaattcactcctcagacagcaagtggccagtggccaggagacaaaggcttctcagagcagtctacagaccgctggctgtcccggatgcttcagcccagccccggctttgccgacagagagctcagtaggaagagaggggcttgaatctgagcggtgatttaaatcttagcttagagaagctaaatgctccatctgcagtcatgtgatgctttcacaggaacatcgcagcgtgcggcagggagaggcagccatgcctagagaccagcctctgcatatttatggtagataattccctacgtttggacactgctgggggtcaaaggagaataatccccaggcactatggtgggcattttcctctgaagatttctaaaaggactgacaaaatattctcactgtgattccgacaattgtctatataggttatctgactataaaacaacattcatgcccagcatgacagtatacaactatcattctgccattcaggagggaggataaagaaaaaatttctaaaaatttgagcctagcctggcctacagggtgcgactttgtttcaataaaagaataaattaaaataaaaccaaacagtgacaacaacaaaacacactggaaagatttactctgtcctgaacatggtggtgcatgcctttaatcttagcactggggaagctgaggcaggaagatagtcaattccaggttaacctgggctacattgtgagacactgtaacaaagcaaagggatgaatgagtaatgaaaagatactctgggtttaaatgacccactgaaagtcaataggcaagtgagctctggccagaagtagaaccaggtacgtctgtccagttgttcttcacagtactgcagcctacttcttgtttacgttgttctctagaactaccatgtgacctacagaaaacctgtttgggtcagcaggatggggtgggatggggtgtcaggtacaattggtccatttgtgaactgcaaagtttaatggaagagagaaaagcccctatagatagaacaggaatggatgttctagtttcctctccatccccattctcagggaggtctaagcataccctctttcaggtctggtacagcaccaggcacacctgttagctatcatgttggacggccttcaggacaaacacactgtaaatgccatagagccaggatgcctggtcttagggtaacacagaaggagacaagggcagaggatagtgtcacaggagtcttctgtgttcagaaaaccccaacaccttacaagcctgagctagctgtgtgaccaagacttactagtgtgagaattctgtgaccaaaggcctttgacacacatggttctattggacagtgatagcaacgtaagtggatacaagtgagcgaagcctccacattaactgtggttatggttgagggttatcttttgtgaaacatacttccggtttgtggattcagtacttggctatgtagttctgctcagtggtttggctcttgccatacaggctcatgaatggaaattcagatccccagagcccatgtaagtggcatgtggggatatatgtgtttgtgtgtgtgtgtttataccacactcacacacacacacaatgaaaatggcagagatatttgcagagcacatgttatgcaacaggtactcccttgtctgttgatggagaatcaatccctaatgtctaagaggagaactatgacagagatcttgcaggatggatgaaatacaacacaggcacatgtacgcagcagggaggggggggggagcaaaagggaagggcctgggaaggataaacaaggctccagaatggatggacaagcgcccactaggggaaaggggttcatactgcggggctgaggcagagagagcactacatgggtgagttgaccagggacagcctgaatttgcaggtcgtttgaccacagaggttcaacccattctacacgccacccataacatccccatgcttctttcttaaacgttatagcatagccttgctttaagagcgcaggattttactccaccaacacattcagacttttgaatctcttcaactccatgctggaagttcggcaggattttttgttgttgtttgtaattgtggtaatatacattataaaatcttccattttgccatttttacatacacttatagtagtcctgaatgtacttttcttgttgtgaccaccactcccacgaggcacctctagaactttcccatctcctcacaccagaaatttcagccctattaaaacaatagcttcctgtttcccattccacccaacccttagcgactgactcctagtgagtaattgttaaattgttttcagtttcatctaagaaatcccaggttgctttaccgcaacatgagagaaatggaattctccaagagaggggagcagcgccaaggggcgtttctgactggggacagctgtgggcttttgaggcccagccacctctttaaatgcatttgggagctgctgccaggtcttcagaattcaccagggaggctggagctccccctacagcctagtgacgtcattgcagcaatgctggcgaaatcactaaacacctggttccaagtacctaggaaataggagaagaaaaccatctaagagctactagatggactagggggatgctgaggacaactgtccatgcctctgaaataacctcgtctcctcctcctcctcctcctcctcctcctcctcctcctcctcctcctcctcttctcctctctctcctcctcctcctcctcctcctcctcctcctcctcctcctcctcctcttcctcctcctcctccttctcctctgcctcctcctccttttccttccactcatacacactggcatttcataaccctgccaaagcttaaatcccctcatgtacctcgactgtccagagtcatccataatgctgaagctccggtaagcaaggattttcttcaagagaatttggaacttaggcttcagcaaaagcgacaactgtgtttctggggatagcaagtattaaatgaaacacagagctcaacctttgaccacctctggtcccaaaggctttcttgggacttcccacagggcagaagccttcctgtttctgcatgaatctttgtctattgcctaaattctagctcagggaattgcattctttctagcccttctttgtgtgttttgtcagtcttcagcatcatagccgaggcagcattttcctgaggacattttgcctttccataagaacacagagacgggtgggccctctcagcattgcaacttatccacagatgaattataggccaacacaggagcagtggagcaaaggtatccagagcagaaccttggagaatggaagacctcaagagatccacctatcctgtcctcacaatcaggtaggtgtataattaaataattgatgttacttacttcttggattgaagcttccacagccctctggagttttataactctcctagcaagcaacctaacattaaatgaagctcttccttcttgagggttgctcagccaccctgagtttttgtattggattacccccaggggttaggtcctaggttttactttagcataaatgaattatataatttatttgtgtctttaaaatcactgaaagacactaggtacctcatgatgtcgttgtccatgtgaaaggttcaattcatgaagtgtttattgaatatgtgttccaccttccactcacatggccttggagaagctagctaatggctcagcgtttgagttgtgtcatctctaaattgaggacgaagtgagtagcggtaagatcgatgtgctggttaaataggagtgcatgaaaagtcattagtattactaatgtaaaatattataaaacaaacacattgtataattaatctggaagataatgaaatattcaggaaatcagttaaggaagataaagacaccaagatgaaggagcaacagcacatgctctcaaatatgctttgagcctatgctttttgattgctattgtgatcacttaagtccaatatttataactgtggccaataaatatatgttgatagaatgaactttaaccatagggaaactatcatgaatggcaataccaaatacaaatttgcacttgatttgcatttttaaaaatggatatgatgttgatagacaataaaagaagtgaaaggtcatttgaccaatttaataaaactgtgtttcttagttattccttgtaatgagaaagaaagtaataatatttgtataaataaatggttctcaaaaacaccaaacaaatctgactacctgaaggttgagaattcagtatgttgaacacagagataatgcatttggggaagctctgacccatgagaaaggagtcttgcacagcttggataactttgtgtcctccatgctccgacactccttgacatgtgtttgggggatggcaacagagtaggaggagagccaacacctagagagggttgctctgtggaataacaggttgaagtcattgctcagaattcataataaaatacagaagtctagagaggcaagctggagaccagtctagggagctttggaatcaatgccccactggcctgaataccatagggtttgaaggcaaagcatgttcctatagaagcagataattggggaagcttgtggaggagtgaatagactctgggagaagatagtcaaaaacttggccttttcagctgtctgcatgaaagagaggaaatgcaaaggaagagatgagtttggcaagagtgaagaaacactcagtaggacatatcttgactacatggaatagcaggctatgttatcactaattgacatttgaccttgaaaagtaacctcactccatttctttgttcatagaataaaccattcctcagctctcataatttctaatagtttagaattctgtaaaatttaacatttctaaccgggcattgatggtgcatgcctttaatcccagcactcgggagacagaagcaggcagatctctgtgagttcgaggccagcctggtctccagagtgagtaccaggataggcaccaaagctacacagagaaaccctgtctcggaantatgatagaaggagaaaactgattcacaaattgtcttttagcttctacatctgtgcagtgacttgcatgtgctcacatgcatgtgctcatacaagctcaaaaaaaaaaaaaaaaaaacaacttaacattcctaatgcaataacaagtccccatcccctttgccgctttaccttagtgtgtggtggtgaccagggatgaccttcattctctgaagaatttcaggttgtcactccattacagtgtagtgtctcagtcttcctagtacagtgtaaacttgccacacagcatctgaaggatgttcaactaggaatttccttacctatgatctcttatccatgtggctgttctgaaataaagctagcatgcgacatttttctgtaagcaaaaattgtatcttattccccactgtcaatataaagcttgcatatatgaaaatatgaagaatgaataagtgagtcacgtgatgggaatggggaaagaagctttgaatcccatctttttggccaatgataagttatgttctcaaaaggcttatgacagacactggtagcctcctatttaaatttttagcattctttgagttctctagaagtgacactcttaacctttgatccatggctgtatctgttacttgacactcagcttctctaacctgtctaagatcatttgaaggctgtggacacatcttctcttcagattagagcatccactgtggtttccatccaaagcatcagctaagattttctaggccagggtcctagtatgagttaacaaataccaacacattttctaagcttaaaagaatactctattattgtgtgccaattggtaaagaacttattaattaaggatataagatagagagaaatctcccaggaggcaaaaagccattacgaagacatcgtggaaccaatctagcagttaatagaatactcagaggtcccttaaaaaagagaagggttgggtcactttttaaaagaagagacttcatcagattagtgatattaaagatcccaggtcataacataaaatgtcacaaccactcactaaggggaaactttaccaagaaacaagtacaatctaaaaggaaagtgaaagatctcagacatttgctttgatacaatgcaatctcctccattataacacctctgtgtcctaaacacaccaccacagagcataaaagcaaactgagatgggattggaaatcaaagcagtgttgcaaatgagaattaatagtacacttgcttttttgttcagagacggggtcatcggaaacaaaataagtaactcatttcaaatgcctgtgagttgtttgcttaagaaacaactaccaaattaacaagaaacatccaactcttctctatcctttcttaaattgtaaccccccccacacacacacacacacacagctccacacagtttatctcatcatacctggatgattctgtgttttggaaagagatttgatgaaataggccaaatagggaggacaacccaagagctggctcctccgagtagggttggggatcctacatgtgtgctctaccgggtattcaaaacatccaatgactccagtcttgggagcaggtgctcatgggaacttcttacacctacagcaatccttttaaccgaatacaatcaaagcaccaaatagttccccattggtccccagtggttcttttgttgtggagacaaaaccagaactgagaaatatctgcacctgaggaaactgggagctaagaggatgtcaacaacaaccaaaccagcacagatatgtccctgctagactttggagttcaaagttacctcatatgctgaacttgtagattgtttacactatgagatgtttagtgggagataatttaatcagtagatgacagtcaggtgtgaagagcactgaacatgaacctaaggcatacatctggctggacatggatcatactagatatgaatctgatttagacgtggctctgactggattagacattagacatggattagacatggatttggctggtcgtggatctggacttgcagtctcaggacatgttaacactaattctgttttcatgagacaccactttctctttctgaacctcttctagtctcatctagaaaaaagctagaatggatgttagccttgtttgctgcacaaagtgtatttgaagatcagaaaagacaaggtgtgccaatggagatggtaaagttaaaaagaacaatgacgaagacgatgctgcaaagatgaagatgacaatgatgggcatgatgatggtcatgatgacaatgatggtcacgatgacaatgatggtcatgatgacaatgatgatggtcatgatgacaatgatgatggtcatgatgacaatgatgatgatgtgttattggttgaggtcaactccctatgtttattctttaaaaagatgatgaagctttatgacaaagtataaaagaaatgaaaagatcattctttgagaagaaactttttacaagaattccacatctaccataacaagacattaagtactgataaacaaaaaatatttaattgctcttgatttctaggacaactcaagcaatgataacagaggccattatacagcaatggtgttttgccagtgtgtgactgtcccccacactgtgggacctcaggagcttgtcccaacatttcagcctcctctgcacacagttgctgatactgttgcctgtccttcaaatgttttcccttgtttattctgcacatagcagtttccttctcaattttaggtttcagtttaaatgtcatctcttgagagcagagctccatgattatgatagctaaagtagcctctatctcacttatacacacacacacacacacacacacacacacacacacactcacactcattcacatgcacgcacacatgaacattcacactgaaacatacttatatatgcatacctgtatgcacacacacatacatagatacacacacacacacacacacacatacacacacacacacacaccaaacattttgcatcctcatgtgttggtttagtgacactcaacatgactggtgactaacatgctaactgatgtgatttgcctgtttgtttccccacccctaccccaatccacacaccaattatgacttggactttatcttattcactgacatttcccagttcctggtataaattctgtcacccagtaaacatgtgttgggtgaatgaatggtttatccatgctgcatcccatgctgtaagtgggtagggcataggttattaaaacatatttcatagaaagaattgcttgccattgtgtaactgttaaaggaaattatttgtgcaagactacttttaacaagtgatgaagcccagagtagaacttatgtattttgacttccacagaaataaatactaattaaaggtcctcttcttgagggtactaatcaacttggtagcccaacttccccatacctgcttgccagcttgtgtctcctctgctgcctgtctcctctggagtaactaaacacagcttttcatatattaaggatgcagatcatgagctccacagtcagcacacctgcagggacttctccctagcaggaaagtgggacccctctttgtaaatagacgggagtgatttccctttcaaatagcttgagtctgtctttggcacaagcctggaaaagcctatttgaagcatctactttccattttgtctttttgcagtgctagacatttaaccagggccatgttcatgccaggaaatcatctacccctggctcctacaattttctgcccccctttctgtgatggtccctgaacattttgaggggctgtggtcacgctgttccttttgaccagttgtgactcactgtattaactccactatacaaagaaacttctctgacgaggatagagggtggcactaatctacagaaagagatacaaatttaaagagcattttcacattttgtccgtgtagcaaagtaatagtagtagttttaaccctggggcctgagagcacacgcattcagaggtcaggctcccacatgcttttggaaaaatccagggggccaacaccatgacctcatctccaaaatcctccagatcagcagtcttaaccttaaggccctggtaaccaatattgattttaatatcctcacctgaggcttcttacagtgggagggtaagttccccattctcttaatggcaggagacgtagacaagaacaaagtataaaccaaagactgactcaaacaaaaactggaagtgtgtcagacctaagtgtagatgttcctacttaatgcgccagggttaccagagagacacaaaggaaaagacagaaaagaaggagggtccccgcactcaccttctcgaggactcaggacatgaaacactaggggccaactcatcgaacaagtctccaaagacgaggcactgcaaacttgaagaggagttcgaaagtgttcgggtagtgaaagcaaaagtgcaccaagataggatccatccgccatgcaccaccagcaacaaacggcaaagatcagggcccctaaaatcccgccgattcaagcagggcgagacccatgccagcacaggatccacaagccctgtgtctaggagccagatgttgtgggtgaccctgctcggacaccccttgggggagggggtgagaagacacagcagcatggtctcgggccccaggagtcattgagtaacagagctcgttgaagactcgtttattaaggaagttaggcctggctttataccccctcccaaggtccttctggctcaggcggctggctcttctgagttgtcctttcctcattggtatctctggtcaggtgtctctttgtcagcagtctctgggcatagaggcaggcttggctcagggaggaaatgcaggctgacctgggcacctgtagcttggatagcctggctgtagtttctcctacaaccaggaacacgatttctcctatggagtagaacttaaacccaacccaaaagcagttggttactttcataatgttcatgtcactattacactcgtgaccacaccttgccatgctggtcattaatgcagttcacaaggttcacagataaatgagactattggtagccctgccccccccagcccccagaatagcacttcctgctactatgagaactagcagtaggaagtttccttgatttctctgaatcctgtgattaatgtggcaccttcagcaatgggtctcaccatcaagtcacatgggttccaagttgcacgtgttgttttctaacctttccgtcagttaacctcctccaacagccccccccctccccccgtcgttcttcccacccctcttcccacctaaacctccctcctcatctcttgcttgccaggtacattttagcctctcagctaccagtttttggtttcctcccacactgatgcgttgaagaagtgtgtcttgctttgctcatctgccacctttttgtttttaaaactccagagtcttactttctgggtcctgcttttcagaagtcattatatttagactgtttgcagccctccttgtcacttggcacctaaccccagtcttccctttagccactgtcagcacagtccctgacacacacggagatggaggaagcatttctcacacgggcccagatctcttaacaccctcattctatgttgttcgtagaacatgttctgcaactgttgtggcgactgataacggagaaacaattgagttgatgggaacaaagagagctcagaggcagcaaaagaccaagcccatttccaccatctgtttccactcatgtctagagcaaggctggcggattttgtgttcaagaccagcctgggagagagaacaaaaccccatctcaaaaaagcaagagaaccgggctctttgcttcaattcttttccatccaggcttcaaatttccctctctcattctattaaaaggagtcagttctttgtgctgcaaggccaactacataaatataatactgtcatttgacataccagcttctttaagaagcccagcagcttgaactatttcaaactttgtatgaattaagtgaccaaagacacccccaaagctgggcttagcactaatttgttcaggtctcttgtacacatcctggttctaaacaagataaattgcacagcccaatttaggatgtaaatcatttccaagaaaaggaaacaagggccaagtactcgcagcagggcgggcatgctaagcccacatccacacactttggagctgactgcctgagaatttggaagcacgtctgattcagttctccttgcaattggccaaaattcttgtggaaataaagtcatgtgaaatgaagtctgcattggatgactgcgcactgtactgcacaaaagaaatgagaaaagagcaaaagaaacgggatatgtcacatggtgactacagggaacaggggaagcatctaatcacagcggcgccggggaccttggacctgtccagaaagatcctgagttctccgtgtttaattgcccttgatggctgctggtcactcatgcatgacaatgccggcatgtctccctgcttcctgcctctgtgaattcctgtcagccttcactccaggtgatgagcatgggccttggaccttagggaagggatggagggggggcaggtctctgagccaaatttggtggttgggctggttggaggaatacctcacagaagcaaagcaatttataccctgatgtaccacagcatgggcagcagtcttcaggaccaggctccaactcctcacttctccccccatttacagtatatttattttccttgagagaaaaacaaaactaggccacaacacgcaactggtcaggaggtctgtgacccggggaccatcaattggcagcatgcaagtctcctgtgcagtcaattacctttgagcacatgcttgaggctggatagagagatttgaattacacttgaataataaaggacattatctttcttggtgacccgctgctcttcaatctctttatttggttttcacaagaggtgtaaaagaaatcatgtttctactgagacaaataacaagaaatattctgaatcccggagaaatggtctttttgtgactgtgatgcggatgatagcatctctcagcttagctgttcattcttagtgtgggctgagaacctctttggagagacagaccccagataggaagctttcagagattgttgagctatctcagtgtatggaagtctcatgtagataatcaccctggatggctcactgcagaacgtatgctttgtattagtcaggctttccgtggctgtgacaaatgccctagatgaacatcttaacgggagaaaatgttagtattagctcacggtttcagaggtgttagtccatagtccttgcttggctctgctgattctgggtctgtggtgacgcagagcatcatgactgcagcagcatgtggcagagcctgcttttctcatgatagacaggaaagagagaaagagcccaatcttcagttaaaagttgccaatactgtctaaaaaggtgtcattagatgtggactagggatccaacacatgaaaccatggggccatttcacagtcaaaccataatacagaaatataattgtatgttgtatatatgcacactcacatatgtttttcctttgagacaaggtcttgctaattaacccaggctagccttttgaactcttggtgagcttcctccctaggcttcctaagtgctggggttatagacatgggccaccaggttatccagtttagacatattgaaatgtcccattgtagctcagtacatatgggcaatggtatatgtagtcaagtcacttaagagttcgaggcagaatgaaagagtgcagttgagtcttgaagacactgcctcgatggtcctcattctcatcaacatcacaggaagtgttgggaagagcttaaattcacgagcatgaattacctcatctcatagagatgacatgggaattaaaggagccagcatctacctaggagtttcatttgcatataagcagacaagtctcatccatgtaaggtccagataaacaatctattttcataaacttagtgataagagtttaaactatgagcagtgcagttagtcaggcttggatttgaatactgactgggctactagttaactgtttcattttgtgttaattttttcactttaaaagtagaagtaattattcttctgatgagtttaactgagcaactgtagagatagccgaataagatcgagggcacacatcaggcaacaccctaaatacagagcacaaagttagaaataagattctgatttggaaaaaaagataaaatcaaccatggtgaacatttggatgttataaaggatcaatgagatataactatgttaaagtcggtcatattttcctcagtaagagccaaaaataaaaaatgaaaacatgcaaattttatctagagttaaaaagtctcctttctttacagcaacgcttgtcagttttgctgtgtttccctccagttacatacacagtacttgttccttgtttaaaagaaaagtattaaagccaaccagttaataaaaattaagacaatggatctcaacctgtgggtcatgacccctttggtgtcaaatgaccttttcacgggggtttgtcacctaagaccattggaaaacacagatatttacattatgatttataaaagtagcaaaattacagttatgaagtaacaatgaaaatcattccacagcatgaggaactctattaaaggcttgcagcattaggaaggttggcaaccactgagctaagacaatataaaagatcacctgaaattctaccatccgatgataagcattattaatattgagtgaccgtgttttaaatgcacatggttctgcacacatacaaaacaaaagataagttcctacgattgtccatgtcactttccaaatccaatatttttacactcttttaagttaaactattcatacccaaacttcagtttgacttgttccttctcttcctgggtccccagctgatcttcactcccatgcgaccacacatggagaaaaagacaactgatacttcctgtttcctccccctccccaagcatctcacatgccctacccgtgtacaaaccaccaaagagtccggcagtgacaacgagactgctgttggctggggagggtggaattattctcttcccagaatcacccacaagaaatctttcttaaatgagattttgcagctattgcttaccctgtagctactagcaataaaaatcattacacatcatttttctatggtacttaagttagaactaagatatgtgctggaacccattctcccttacctctgcatcacttatctccctgcatcttttactgtccattctcaatttgctgttttggccttgtctttatcaattagttactgctggtaaagtttctctcttggtgtctcacagtatggtccttatgagtccctgaggataacactgtagagtatttacttttatctagaataccttcttcagtcacagatgcttgtgtgtcattggttgggagctctgatccttagcttccctttaccacccaccattattatccctcatttgagaaagagagattgattttttttttaaaacgtgaaactgttttcctaggggtccattcagctatacacaaggagttttgctttcctgggttttttgattgtgtgtagctgctggtcatgtcattctaagtatagaattgagtatagacttgaagcacttccctccagtttagtttgtgggagggaaactcaacatgcgtgctcatttggtttggggacaacaatctgacagctctgtcaaaggtgtaaatattttgccagcaagtaaccaactctgacaacttagacttcatcagcctctacagcctgtggtgagaacggagaggggggcagaattggagatagaattttctggaaggcaggggagtctgggcatagccgtagcagatatgtaagtatacaaacacccagagctctttgaagctatgaatagttcagaaagctgaagttgggatctctccacacagattaatcagggaaatgtcagtgtcagattgtcatttccagcaaaagaaaatgtcctcgaaaggcagatactttcctgaagaaatgtggagcccaggtcaaaacactggcaaatgccagtaaacacagtccacatgctggtggcccaggctcaccctctgcaacaacatttcaaaaaggagttgacaaagccacacaatggggtaaaaatgtatatactgaaattcaaagatggatcaatcaacagattccagaatcatacacacacacacacacacacacacacacacacacacacacacacacacacacacaatcccatgaggaaagcagcttgagttgaatgtgaaatgatgggtggcatttggctttgtggaaaggaaaaggccatccacaaaatcatagagtgtgaagagagtgaacttcgaggagtaacgtcatcttcctgacctcagctgacacagtcagtggagaagcatggaaaagatgattggtatggatgcttgtgctgtgggcggtgactgaggtagggctacagtgaggtaatttggctataaaatagcaccaagtgtctgcttcagcttgtgttctatctcctcttttgaaaaatcacctatatattatatgttaacactgatatcatggtcactgaccttgacattctctgacactgggtttgtgttctggaactttccacagcacccatgtgaagaaaagggaaagaagaaacacactgtgaataaggagtgagacttgagcacaaggtgctgtgagtatcaatgagtcttagagataagatgcctgagagtctgggtcccttgcacctgctggctgagtgttacattcaggaacactatgccagcaggtagcaagacctgcattcttgagacacagcagagaactgaagctggattcctctcctagacccatggagccacagacccttagaaggtctcctggtctctagtcacaagcacagtttgcttagaaagaacgagtcatgcttcaagatttagccattgtttagatttctgtaattctgaggcacctactcctctgatggaacagactagtgccagttttccagttgattttgtttgtttgtttgtttgtttgtttgttggagacgggatctatgtagccctggatgtactggaactcactatgtagaacacaatggccttgaactcagagatcctcctgcctctgcctcccaagtgctgggtttaaaggtgtgcaccaccacgcccacttcagtttcccatttggaatgggttatggctggtagaaaatggtttcttatatgaaagtgatgatctgagaatttctctccaaccaaacagagtactgatccccgaagcattctcaaaactacacacaccaggctgcatataagatcctcctccacagagttcaaccccagaaggagagcacctaccccactaaggtgtcctctgacctctacctctgtgctgtggtccttgcaataggcaggtttcatatgtggcgcaggcacacacaaatcagacattatcatgagagacagcctggatcaaggatcatagtcatcagtctgcttgttcatagttctgtcatctacagttacagtaaactgagactaacccttctactccatgtgtgaggacaacttttatgttcaaacattcccctactgtagcttgactcctgaatgtcctcaaagacccatgagttaaaggcttagtcccaagcattgttctactgggacctggcataacctttaagaaccagggaccactaggatttcttcgggttactggggacattccctccaacaggatcatgagaccttattctcttcatcttcatccccatctgtatgaggtgaacagatttgcctcactaacatggccccactcctgctgtgacatgctgtcatagggccaaagcaacagcaggcccccgatatctggctattccttttctctttgtgaggtgatagccttgaaagtaaagctgttgtcgccaccctattcttcctgtttctacaagctaaagatctctgcttccttggtagtttctttgtataacataatcttctgtatccccaccactatcatcacactcaaatggctcttcttttgttaagagtttgtgttgtcaatatgaatacacaattcttaggtgtggtttggccaaagggatggatgcttacgcttgggatcctgtcactgcttgtcagggctgaaggtttttgcaatggggttcttgctttgtgggtcccaaattcctgattcaggcaattctttctctgtatcatagtacctgggtcaggcgattaatctttgaatcttaccttcataacctgacattttaatgttagttttgttttgaatcttacatctaccatcagtgcatttccttgacatcaatatttggaccaaatcttaaaacaaatgaaagtgaatacagattgtggatagttgtcagtttccaaacaatagaatctagaagaacagcatgccaaatgcaaaacggagagaggagaaaagcaggtagataagggaaagccaaagattgtgatgcaaagacagatcctttctttgattatatttgtttatttattggtgagggaggctgctgggagttagttttctccttccaccatgtggggcccagggagcaaacttgggtcaacagtcggtcagacagggttcttacctgctgagccacctggcctgacccaatcctagtgattttcggaagcaggtaagcttccttatgttgaaagaaatgattccaaatccttatttctcatcatcccactgtgaagatgtactcaaatggagccctagtgagggagcaatctggcaagagtttcccaggcaggccattataaaattgataaaacttcctaaaggatttccacatgaatgagagtaggtgactttgtataataagggcactgatactggggtgaatgagaagcacttttaatcacatgctgtattgaaatgtagatcccaaggtaagaggccatcattagtgtccaacactaccccagtccccagacatctatagcaactcacacagaaggatttcagtatcgttgtaaacaaaaccccactgctgattctatttgtcttataaggagtgataatggtctggtaaaaattagaggagataacaaaaattatttgaaattacaatggaaaaattaggtctgaagttaataggtcagaaatatatttaaagttgggacaagacaagaaaaatccagtcctgcacatgatgcacaaagctttcagtcatgcttctttttaatttctaagaatttcatacttgaataccctaggtttatattatttaaaccctctcgccactctactccaactccttctatgtccctttcagttccccctgaatccatggcctcatcttctataattactgttacacaccacacacacacacatacataccacacacacacatacttaccacacacacacacacacacacacaccacactgctgcacccatttactgttgcccttctctatattagggctgaacacttgggataactcatcacggtgcttttccttgaagaaaacgcagtcactgactgcctacagctcttcatttcatcctatgtaaggggccttgtgaagtttgccccattccacctaattttgattaaatcaccctggattatacataaatgaagcaatgttaaatgataaacatagtttttgaaacatattttaagggtgaggagctggctctgcaggtaaatgtgctttggtgaaagcctgagggcttgagcctggtgcctggaaggagagaatcaactccagaacattggcctttgacctctgtaagcatgctgtggcccacgtgcacatgcgagtatatgcgcgcgcacgcacgcacgcgcacatacacacacacacacacacacacacacacacacacacacacacacacagggagagaggggggaggggaacaaacagacagagggagggagaacaacccactaggcgtcaggatttctgaaagcttcccggatgacttcactatacagtccatcacaggactggagggcaagaactacacacaaagtgcctgtcccttcctgcagtggaatcagaacctcctggttttgtggtcttacatgactgtctcacaaccccttcccttttcgaacctgatagtcttgacaaattacccaagacaatgaaagctgaattcaaaagtggggttttcatctctttctttcatggcctctcttccataggaagaagagtaggcctaagaagcctgtagtcagatgagctggcttcgacacatggctgtgacttgggtaagtgacattgtgtgtctcggtgtcatcatggcagtgctgggagatgggctgatcctgcacccggggctttgaacagtgcctgtcacaagacaagggctgtgggagcctttgctcttatcttagacagaatggctctcaagcagaaaatgcatgtggaaaattcctttggccaatgattttgaaagtagctagggggattgagacagaccattttctcggatactcttaactccactcaagaatggagttggttaatgattagatcctataaaattttccatgtcatgtgcctattccccaccaggcaacagaaagtaattaagaattatggggagccaattcggtaagggggaaggcatgcctttctagggatatgctccaaaccctaacgaggttattggcacaggtgtctcctgcaaataaattaatggggaggcagatctcatcattaatctgtcatccaaatttggtgtttagaggcattcggggagatggggcttcctttgcccaaccttggtagtgtctggagcaaagatgaggaagcaggggcatttcattaggataacaaggctgttaaagtgcaatctggctctttggagggacatatgaagcgtttccagaaacctgtattctgtcagctgttgctggcctcgcacacaggatccaacctgatttattgatgtggcaggggagctcttattcttatttgcaaaagttttatgcatggtaacactcaacgtcactgagctgcaaacttcccaaagacacatacacttacctgggtgtttaaattgtcccagcatgggacttgggttgaatggagtatgctaaattcccaattattggatatggtatgtcatttttataaactactacagatccttcttggttaaaaggtggtaaatagaagtatgcttcaattatctgctttgaggttaccctttggtatttcttggttagtgtgatgtgatagagtgtggctcattggaaaatgtaaaagtgtaaattatcagatagaagaaaaataattatgaagaaaccagtgctccagagaatgagcagcctccagactttaaatatgagtggtttttaattaattgttattgctacccatgccattccaccaacccagtttagctaattgacaagataatttactatataagtcaaatcagagtcaccctttaaaaagggatttactttaattttcatgtgtgtgtgtgtgtgtgtgtgtgtgtgtgtgtgtgtgtgtgtgtgtgccatgtgtgcagaggtgttcaaggaagaccgaagaggattttgaatcccttggagttagagttataggcagttgtgagccaccccatgtgggtgctgggaattgaactcaggacacctggaggaacaagaagctctctctaccactgagccacctcttcagtccccctttttactgttgagtggcacagacaatgtagagcattttgagctacatgggctacatgtctgcgttgccaggtgcagtttccaaaggaccagtcctgtctactattcactaccatgtggttagaagaatggggtttccaaaaatgtttttatcagctccgatgtcagtacaatcttaggataggtgacttttcctgggctggaagggatcgcattgtggaagccatcaagtccaagctcgttgattttacagtcgagttaactgaagcccagggagatgaaatgccacacagttgttgttgagccaacacaagaaaatctagtatatgctgagtagtgaaaatgtacacaccctggttatgctatgaccactggtctctgccgtcattggggcatggtgaggtgaaagacacgaggtcagggtagaatggcatcactactaagaatccacaagtcaacgcgaagtggtaggggacagttttaagcaaacaaagcatgtatcctcattcatccccaaggagaatgccaatagcagccaggaacaggtgaggtttcagagtgatggctgacatgacttgtcccttaaaaccagaagctgagtaccactctctgcagctggcaattctggcaactttgaatctcactcactgccgctcagaatgctgggtacttcaagagaagagcctcctgcagcttggcagagatcgatttcagacaaaggaagcaagttctcatttatagtgtgggaaataaattttttattataccagtagatagactgaaaattggatgggtcctgtcaaaaataagatcagatcaagttaaaaataatagcaaagcttatagctagaatctgagaaaacacagactgcaatccgggagacctcaatccaagtggagtgacatttaggtctcagcaccgatggttgtggtaactgcctccccaaggccctgggtttgaggtttgcttctcagtctgtgcttgacagtggcagaacctttaagagacaggacctagtaagagcaagcaagatcatgggttagcataggtgtcacttacctgggacctccagttttaactgcaacaattcaaagtcagtttcaatggattagtatatggtaggccctctaggctgatacctcccactcaaatgtctgagaaaacagagtttttagacacttactaaggagtgactcctgtattttacaagcatcctatatggcatcagtcaccatctatgattgtgaaaaaaaaaaagttacattattgtgaaaaaaaatgtaactctccactgtccaagagtgactgttattaagcatgtgaagtgtgtgtgctggccagttgttgttagtgtttgctgttttgtcaacttgacacaagctaggatcatctgggaaagggggaatgtaactgagaaaatgcctccacctgattggcctgtaggatattgtcttgattcatgattggcatgggaggtgccaccattaggcaggaggtcctgggttgtataaggagaaagctggtgaggccaagaggagcaagccaggaagcagcaccctcccatggcctctgttttagttcctgcctccaggatcctgcctcaagttcctgcacttacttcccttcatggtggactataagctgtaagcagaaattaatccccttctcccccaaattgctacaacagcaacagaaaacaaactaggacagtgtgcatgcaccctctgtccacccatgagccgatgcatgcatggtctttgggaccacatgataagatactacacacgtgccttctgtctacccaggaacagatgcaccatggtctttgggaccacataagtagacattatttctttgtaccctacagaagaaaagtggccgcctgtctgagctcgctgttcctcctgatcggccctgagcagctctcaacttttatctcacattaaaagggagccttatttttcagacacagtgtcatcttcacttaaaacagcagtgcccagcttcctaaggaatttattcagctgactgtgataaaagccatggggcaggtgagaattccaggtagtttactcaaaacattgtaaacttcaggtcatcctctctgtcataccacaccttgaaatgggaatgtgctggtcttcccacagccatcttagacaaggacacactgccggaacactgtggtagtacattgaacagtatgatgggcgctggtggtgtggaggcttccttctcactcttgggatgaccatctccatatgtttctcacatggcagagaaatcaactgtataactcaccacttggggagtatcatttattgtcaccgaatgtcgtcctaacataacactatttaattatgcctctcagtgaaactcagaaacaaattaatttgcaaaacagtttgaatgactggctaaaatacagactcagaattcactgcacatatcagctatgcacaaaattcctatcgcctgttaggagggtcaattcacagttggtatttccctttcccagccatgaccagcttcaatcccagagaacacttcatccttgaatgctaattccatggttctaatggcaggcaatttgggggaggaaattggcagaagatttaaattttaaaatagaacttctcacggctcacctgcagaacattaagacccttgaaaggactcctccggaagaggaagagccgatgtcaccagaaaggtatctattccataggaacttatttatggctaagcgtgcctgtcagtgtgtgctacacagggagccagaggagtaggatttattcttggttcagagaattatggtctccatacccctgggcagaccattcagtctcctaaagctcatataatggcagcaaaaagttacaaatgggaattcgtgaaataataagaggaacgtatttagtctggtgattggcacataggagttgctttatagatgtcagttaagcatacctagttagcaacacaggcacagcaattggaaaaagataacactcagggttcaactttcattttagaacacacgtggtcttttgtccctgtgtctgtggagcaaggaagccacataccattcttctttaaaaacaaacaaacaaacaacaacaaacaacaaccatcttgagacaaagctacatggaagcctaatctcctcacacttgaggtgtgaaactgtccaataccagccaagtgctcatttttagatcagctgctggatgaaatccattttgtccaaagtttagttgagatgtctctgcaacaaagtgtcttcaaggggttcctaggcttacaaaggatgtttgcagtcagggaagagatgtccgtcggtcaccctcacttcctcccctctccctgctgtgtgtgtctgacctgtagaatggctgtgatactgggatagcagaatgaagagagaaactgttatggacttggtgaagaccagaagagctgtgttcaggacagcagcagtctgaggtagacatgaggaggagcgtcaggcgaggcaggccagttgctttcaggctcgatggcagtgatattcagtgcctgctgtttgactcagatgtccatggagagggaaactgaaaaccacagtaaacatggattgctcatccatgccactttcttgtccatagccacccctgtatctatctcatccgttcttacactgtcttccatactccaggctaggtgatagagcatatgttcgtgactttgagggaaggacttaacaaaagaaatttaaaattcatactaatagggtgtggagtatctttcaagacttggccctactctcagacatgagaactccctaagtaatgtttgtaatttagaaaaatcattgatcagagaaatatatattaacatttctgcctactgtgtttccataacacagtagcatatagaaaaatatatgttatagattattacacaaacagatatatacataaatgtgtgttatataatagatgaattcttgtttatggttataaactaatagctgtatattatgtatttttgcacaagttacctacttttgtcctgaaaacatcccatgaagcaggtagccttattttggtctaaaagataaaattaaaattaaaaattaaaaatttaataaaaatgaacagaattatggaaataattgataacaagtcagtgctaagcaacatgagccccacctgactctgaagaacaaactaaaggtcttgagagatttggtccagatactaaaacagtagttctcaacctgagtcccccacagagttcgcatatcagatatttacattacgattgataacagtagcaaaattacagctatgaagtagcaacaaagtaattgtatgcttgggggtccccacaacaggaaggactgcagtaaggatggcaatgttagggaggttgagaagcactgctgtagaggcttagctgtggagtgtgctctcttcagtccctatgagacaacagtgcttgtccctagcaccccgaggggccagcttaagcttctggaggcctcaggactgacatgatgcacgctgcaaactttagctacagattcaccaaagcctccaacaaacatgatgcctgctgcatctctcttagtgcactgagcaagcccaggatagtgctgggtgactgactccgcctctcattactcagggcattagtgctttgctatcttccccctttgaatgcaagttggatgtagtgattcacatctaacaaaagcaccctctctcgttatcttattctaagggaggcaggttccacattgagagtggctccatggaatggtggtgcatgtagcatctgacaaccagccatgatggaagcagctcatgttccagctgaccattgaaagtattgtggccccaccaacactttaagaccagtcttgtgggagaccctggacagacagatggctgcagagtcatctggtaaattacaccagaatttctgactgtaaaaccagctgctaggaaagatttgtggggctggagacaaagcctagatggtagattgcttgcctggcctgtgtgaaaccctcagttccaccctcagcactgggtaggctgggtgtgatggcgtatgcctgtaatgcaagcacttgtttggtgaaggcaagaggatcaggcatgggacatagaaaaccatgcgtcaattgagatcatgggaagaggggggagggagctacgagaatgagatgggaagaagaggaaggatgcagaggtcatgagggagcagaatggttgagtcaggtgtagattagaagaaaggatatgtgatgggtagggttttagttggggggtgataggggaggatgggagggagaagggaactgggattgtcatgcaattcaatcttgtttctaattcaaaaaaaaaaaaagacctagaatgatcacataaaaaaagaaaagaaaaccatgcgtcaataaagaaattcattttgtttaaagctgctgtgcttagggtcattaacaatgcaataataaaaaaaattgaacacatacgaaataaaaggataaatggtaacaaaagaatttgaggtacaatggagacctcctccaaaaatacatatgagtttacatttattttttaaaaaaatgattttgtgaagggaaatgaggtaggaagtacatgggagcccaaagacacctttgtttacataagattacttcctgtagcttaccatgacattaggcaccatgtcattcttttgacagctcactacacttcggccccataattgggaaaaagaaaattgactcaacaataattataataataaatggcaaaattcacttgagcttttacttgtcagtcagatgccacatttgtcactgggcttcaagacagtgatgtgaccggtgtcctcgatcaatggggcggatgacgagactatgaatgatcatagccacaaatgtcaggcttctccctttaaacgcactcagagttgtggagatgatctgaaaggtcacgtcgatagtcgccacctgctacgtctctctttccaaagtctatcagacaacatggaatctatgggacagacagagagaagccaactgcaatagaagcctgacatttaataatggatcagggcacgtcattgtcctattacataatggctgatcttctctacctctgaagaccagccaaggcagtgtctccacccccaccccccaaccctcagggcagagggaaactggcttgttccagccagaggaggagctgctgttcatctcaatgactgggagaatccaccaggtctatctaccccaaggtgaaggcacctgtgagagcacaggcaaatgacataagtgcctgattccacaccgtgtgacgtgggaaagtcccaaccagtgaaaagtctacatatatactttagaagaaatgcaactttggtgcttttttaatacatatagtaacttcaactaattgccaaaataaagtttgctccctctggctctaatgaacagattagtggcacttgcattagcaatatcatttgcataaaattaatttgctaaagccttttaaaatagtgttcagagtggtttaagcatgctcactgccctatttatactattaatttgttaagtaaaccttgcttttttaagtagggcagaagtgaagccccagtccagctgaagtcggaggatagcttcaactgagagaagcctgtatattagtatgcttttctgtgttagggcagcaataggcttataaagcttacttccagcaagccttggcgacagtattcgttgatcgtcaggtaataagaaaaagtagttcagttctgaacctgagttggcattctctttgttaaaagtgacttccccagccgggcattggtggcgcacgcctttaatcccagcactcgggaggcagaggcaggcggatctctgtgagtttgaggccagcctggtctccagagcgagtgccaggataggctccaaagctacacagagaaaccctgtctcaaaaaaccaaaaacaaaaacaaaaacaaaaaaacaaaaacaaaaagtgacttcttcccctacattcattttttttctatgtgtgtgtacctgtgcatgcatatttgcataggggcacatatgtgtgcaggtacatgcaaatacgtatgtgtgtatgttgatacgatcaatcgccactttatttattgagacagcgtcttccactgacaccagagcatgccaactacctagtttagctagccagctaccccagaaaagccttaactccattttccaaattctgagattaccgataggtccgatgcctgcctggctttatgcgtgctctgaggacccaaaactcctgtcttcaaactggtgtagcaagagctttgtccaatggcccacctcccaatctcttgtttccaactgaaactgaagatccttctactaaatgccaatacctgaagaactgtattgacaatagatatgctaacacaggcatctgcaaaacccaggagggctcagccctacacaaaggactgtataagcaactaaggaatgctgagaacaaaacagtcttccccagtcagccctgaaaacatacatatcaggaacattatacagacccagaaggctgtacatatgtatttaggagtgtgtgtgtgtgtgtgagagagagagacagagagagagagagagagagagagagagagagagagagagagagagagagagaagaagaagaagaagaagaagaagaagaagaagaagaagaagaagaagaagaagaaggaaaaagagggcatgaatttgaaaaagagcacaggaaggcatgagtgattataattattatattataacctcaaaacatggaagaaatgattgaaaagttaatgggaattggacaaaacttaaaagaacctaaatacaaacatggtcatatattttcctccactcctgtgtaaatacctcttttaaaaatattaacgacatagaataatttgctatttatacactgacagcactctagacaatccattaaattcgaggcaacctcattaaattgatcagtaaaatattatttgaaaagttagctccagaactcaccaggaaggaggatattaaaaaaaaaaattctccctcaaaaaagtatttaagtagaatactttggggatcaggccattagcttaggccaccatggatcagaatatttccaaagagcttagatgtggaaataccgggtctggggagaagactcggtgggtgaaaatgcttgctgctcaagacctctcggctcacctctgtcctggagagatcagacctcttgcctttcggattgccaaagacttcaacttcaccctacagagcatgttcccttccgtctcctcagagttcagctgttgacagatcccacatattttctttgccctcagtttggatccaatgggctgggatacctttgggacccaagtggcactgccaaagcgttctgcctcatgtcagcaccctttctgccataacaccgtgactcagacacctagggaaacttccatctctcctgacagtaagttgagttcacataatttttgacagtttgtcacctgctcagtgttccttgttagaatacagctgagatccggtatttcaagcttaatatgttttccctcaaatctcagtatgtggcaaacttggccgtcagctttagggagaaaggctcagagaccttttagttggcctggctctctgtcagtggctctctctcaggcagcctgttcactcatcccatttctgtccttgtcataaaacactcaaccaaaagttgtttaggggagaaaaaatttatttgtcttgcatttccaggtcacagtccgtcactgaaggaggtcatggcaggaactcaaatagaaacttgaggctgaaaccatggagggacactgcttgccgactctcttgaaggctcatgcttagctccctttcctacacatcccaggacctatatcagttaacacaaaagacacccccagagatataccccaggtcagtctgatgtggacaatccctccacagatactcccttgtctggtaaccgtaggctgtgtcaagttgacagggaaggctgactacaatggttatgtaacgtgggagactcctgtctatcaggagctgcttatttctgggcttggtagccctaaatcaagttgttgttttgttttgttttgttttgttgtccattgtctggaatctcacacctttgcccttcaaaatgggaagccggcagcatcttcagatccagtaaaaggtagaagccacagtctgaggagcaagctggaattttcatcctgaaatcctgttaataggaatgtggtggtatcttgtttaattgagttttaatttgcattttctaaatgtccggcgagactgaacatcttctcacgtgtttgcagtttcatttttaaattcaaaatatcccctgtggttctcaagtctgtactgctggatcatgggagaaaagtgctccaggttgtcagctcttcaagttaattgcgcagcacatggatttgccgtctccacgtccagagcatccgcaagggactaagcactccctaagcaccccagaggcagaattacttagtgctccttcatttgcttgtaaactgactgtgcactgccatcctaccccagtgagctacttcctgccatgcctgagaattcctggccctccaagactcatggtggcaatgcttacgaagagccagttgtttctgttcttaagtctgggcgatgcaaattggactaagctattccagctacaacgtggttgttatgacagctaagcaaatgccagtaagagctagggggttatttcctagaaatccagaaaaggcagcctgaaaagaaaccctaaagtgatcaaaagcttgatggtatttcacaccccaacaacattaggacatggttaagttcccgtgcatctgaatgaaacatacaactttggaagtaagatttcagtgtggtttatgtaaggaagacaatgccaaacagcgggccaacgtgtaaaaggaagactctgagagaatgtaacagaatgtaacacttgtcacttaccagtgtctagctacaatgttaaatgtgcctgcaacagaatatttgaaaaagaaagcaaataaccaaaaggagtgggagctgcaagtctctctctgccgtggagctgccgtggagcacttgctggtgttcccagggcttgggttctaaccccagcaatggggacacagaggaggaggacaggaaaggagaggagggagaaaagaaagtgaggcgtgttgctaaacatcaatattttgaggtaattgtcattttagttatgaatataaaaatatttacaataatacttttatgatgaatttgcaatttatgtattataaatttcacaaatttttatcttaatgccttcctagtactttagtatatagttataatattcttagtttcctaatcattctatttttaaaattttagctttttttagattttctttcttttttttattagttcaaattaggaacaaacttgcttcacatgtcaatcccttctccctctccctcccctcccccaatagccccccaccccatcacccctctgctacccagggagggaaaggccctccatggaggctccccaaagtccaccacatcatccttggctgtggcctgggtcctcccccatgtgttcgggccccagagagcatcccttcatgtacgatgggctctcaaagtcccttcttacaccagggaaaaatagtgatccactaccaggaggcccatagagtgacgaggcctcctcattgacatccacgttcaggggtctggatcagtcctgtgctggcctcccagacatcagtctggggtccatgtgctcccccttgttcaggccagctgtttctgtgggttacaccagcctggtccagacccctttgatcttcattcctccctctctgcaacagggttccagagttcaattcattgtatatctgtgggtgtctgcctctgcttccatcagccactggatgagagctcctcatgctccccaattagttcaggagatcctgccccttcctttccattctccggggtccatgcatttttctcttacagtccttcttgtttcctagttcccttggtgatgaggattgtaggctggtaatcctttgctctatgtctaaaattcatatatgagtgagtacataccatgtttgtctttttgtgactgggttaactcactcaggatggttttttctagttccatccatttggctgtgtgtagggagacactgtaaccacacctcctaagggctgtctacaggtgtgcctgaccacacctgataaggcgaggtcaaggtgagatcagggtgtctcagaaagggctcttaagcgatcacaagcacatggaaccttctcttttccttctgctgccccttctctctggcctacctgccttgctgcccctgggaatgctctggtttgcctttagctggtatttttcttaaaccaacaagcttgcctttcacctgtgaatttcaaggttccaatgctttttttttttttctgctgagtagtactccattgtgtatatgcaccacattttttctatccattcttcagttgagggacatctaggttgcttccaggttctggctattacaaacaatgctgctatgaacatggttgaacatatgtccttgttgtatgaatgtgcattatttgtgtatatgcccaagagaggaattgctagatcttgaggtagactgatttccactttcctgagcaaccaaccaccattctgacttccaaagtggtcttacaactttgcactcccaccagcaatggaggagtgttcctttttctccatgtcctttccagcccagactgtcattggtgttttctattttagccattctggctggtataagatggtacctcagagttgttttgagttgcatttctctgatagctaaagattttgagcactttcttaagtgtctgtcagccatttcagattcctctgttgagaattctctatttagttctgcaccccacttttcaatttcattgactggtgttttggtggctagtttcttgagttcattgtatattttggagatcagccctctgtcagatgtggggttggtgaagatcttttcccattctgtggactgtcgttttgtcttgctgactgtgtcctttgccttacagaaggttctcagtttcgggaagtctcatttattaattgtagatctcaatgtctgtgctactggtgttatgttcaggaagcagtctcctgtaccaattcattcgaaggtaccacctaccttctcttctaagaggttcagtgtgactggagttatgttgacgtctttgatccatttgggcttatgttttgtgcatggtgatagatacagatgtctctgcaatcgtctgcatatccgaatccagttatgccagcactatttgttgaagatgctttcttttttctattgtatagatttagcttctttgtcaaaaatcaggtgttcataggtgtgtgggttaatatcagggttttcaattcgattccattggtctatctgtctatttttgtgccaataccaagctgttttcagtactacagctctgtaatagagcttgaagtcagggatgatgatgcctccagaagttcctttattgtacagggttgatttggctatcctgggttttgtgtttttccatataaagttgagtattgttctttcaaggtctgtgaagaattgtgccagtattttgatggggattgcattgaatctgcagattgcttttggcaagattgccatttttactatgttgatcctgcctacccgagagcatgggagatcattccattttctggtatcttctttagtttctttctttaaagattcaaagttcttactgtagaggtctttcacttttttggttagcgttaccccaagatattttatgttgtttgccgatattgagaagggtgatgtttctttgatttttttctcattgcatttatcatctgtgtatagtagagggctactgattttttaagttaattttgtatcctgctactttgctgaaggtgcttttcagctgtaggagctccctggtagagtttttcgggtcacttatgtagactatcatatcatctgcaaatagtgaaagtttgactttttcctttccaatttatatcctcttgatctccttttcttgtcttattgctctagctagaacttcaagtacaatattgaagatatatggagagagtggacagccttgtcttgttcctgattttagaggaatagctttgagtttctctctatttagtttgatgttggctgttggtttgctgtatattgcttttatcatgtttagatatgttcctgttattcctgttctctccaagatctttatcatgaagggatgtcggattttgttaaaggcttttttaacatctagtgagatgtctttttcagtttgtttatatggtggattacattgatggattttcatatggtgaaccatccttgcatccatgggatgaagcctacttgatcatggtggatgatttttctgatgtgtctcttgaattcaatttgctaatattttgttgagtatttttgcatcaatgttcatgaaggatattggtctgtagttctcttttttagttgtatctttgtgtggcttgggtacaaaatgtttccctagtttctactttattgatttcagccctcagtttgattatttcctggcatctactccccgtggttagtttgttcctttttgttttaaagctttcagttgttctgtcaattctctagtgtgactattctccagtttcttcatctgggcacttagtgctatgaactttcctcttagcactgctttcagaatgtcccataagtttgggtatgctgtgtctacattctcattaaattctaggaagtctttaatttctttttttatttcttccttgacccaggaattgtgcaattgggtgctattcaatttccttgagtttgtaggttttctgcaatttgtattgctgttgaattctaattttaaatcgtggtagtctgataagatacagggggttatttcaagttttttgtatctgtgaaggtttgctttgttgccaagtatgtggtcaattttagagacagttccatgtggccctgagaagaaggtatattcttttgcatttggatggaatgttatatagatgtctgtaaatcccaaatgggtcataacttctgttagatcctttgtttctttgttaagtttctgtctggtgttcctgtctataggtgaaaggagggtggtgaagtctcctactataagtgtgtgtggttttatgtgtgatttgagctttattaatgcttcttttacaaatgggggtgcctttgtatttggggtatagatgttcaggattgagacttcatcttgatggacttttcctgtgatgagtatgaaatgcccttcttcatctcttttgattgattttagtttgaagtctaatttgttagatattaggattgctacaccagcttgttccttgggtccatttgactggaaaatcctttcccaaccctttactgtgaggtaatgcctgtctttgaagtttaggtgtgtttcctgtatacagcagaatgatggattctgtcttagtatccattctgttagcctgtatctttttataggcaggttaataccattgacattgagggatattaatgtccattgattgttgtttcttgttttggatttattgttggtggtgtcattgtatgtggatgtcgacctcctgtttcttttcgtatttggtaaagttggattatctgttacctatgtttttgtgagtgtagttatcttcgttgggttgaagttttccttccagaactttccatagggctggatttgtggatatgtattgcttaactctggttttgtcatggaatatcttgttttctccatctatagtgattgaaaactttgctggatacagtagttttggctggcatccttgttcccttagtgtttgtaggacatctatccaggaccttctggctttcaaagtttccattgagaagtcgggtgtaattctgataggtctgcctttatatgttacttggcctttttcttttgctgctcttaatattttctctttattctgtaagtttggtattttgattattatgaggggacttctttttgtgatccagtctgtttggtgttctgtaagtttcttgtactttcataggcatatccttctgtaggttggggaagttttcttctatgattttgttgaatatgttttctgtacctttgagctgtatttcttcaccttcttctatacctattattcttaggttcagtcttttcatggtgtcccatatttcctggatattttgtgttaggaatttgttgtacttgagattttctttggtcgatgactgtatatcctctagagagtcttcaacaactgagattttctcttccatctcttgtattcgattggttatactcacatccttagttcctgatggtttatccagcctttctatttccagcatcccctcattctgtgttttatttattgtttctatttcagctttcatgccttgaactgctttgagtacttccgtcacttgtttggttggttttgctggatacagtagttttggctggcatccttgttcccttagtggatggtggtgaagtctcctactataagtgtgtgtggttttatgtgtgatttgagctttattaatgcttcttttacaaatgggggtgcctttgtatttggggtatagatgttcaggattgagacttcatcttgatggacttttcctgtgatgagtatgaaatgcccttcttctttagattctttaagagaattacttttttcttgaatgttttgtttgtttttttttcttctatttctttaagagactttcttgtttcctctttaagggtcttgaacttcttcataaagtagatttttaggtctgtctgttcttcttcctctgtgttgggcttttcagtttgctggtatggagtccctagattctggtggtgtcatattggactttctgttgttgagtgtgttcttgttctgtcttcttcccatctcctcttccagtgggtgcaggtggggtctctctatctcctcttgtcacccagtggtgtgtgtgggccaagacttcaatgtctgcagctctggatggtcttgccttttctggtagtctcctcactcagccggggttggagcagtggagggggaaggaagagtgaggtgtttctggactcagggagatcctccctgtctgggcgggtccactctatggcaggcacaggcccggagatatccaggggaagattttagcttttttttgggggggggatgagacagagtttctctgtgtagttttggagcctattcttgcactcgctctgtagaccaggttggccttgaactcacagagatttgcctgcctctacctcctgagtgctgcgattaaaggcgtgcaccaccaacgcccagttaaaatcataatttccctcctttgtgtttttttgttttgttttttgttttgttttgttttgttttttgagacaggggtctctgtgcagctttggagcctatcctggcacttgatctggagaccaggctggcctcgaactcacagagatctgcctgcctctgcctcccaagttctgggattaaaggtgtgcgccaccaatgcccagtgaattttagctttttttttaaacaatctttttttattttaatttacataccaatcctagttccctagagggtatgtcctcccatggggagtcaacaaattctatcacatcaccttggggcaggaccaaggtacttccccctgtatctaggccgagcaaggtatccctccatagggaatagcctcaaaaagccagttcatgcactagggataaatcctggtcccactgccagggacccataaactacccaagccacacaactgtcacctacattcagagggcctagtttggtcctatgcatattccacagctgtcagtccagagtcagtgagctcttactagctcaggtcagtggtttttgtgtgtttcccaatcatggtcttaaccactttgctgatattatcacttctccctctcttcaactggactcatggagcttggcccagtgcttacctgtggatctctgcatctgctttcatcagttactggatgaaggttctatgatgacaattagggtagtcactaatctgattacaggagaaggccagttcaggcaccctctccattgatgcttagggtctttgttggggttatccttgaggattcctgggaatttccctagttccaagtttctcaacaaccccataaaggctccctctattgagatatctctttccttgccctccctctctgtccttcccccaacttgaccatcctgttccctcatgctctccttccctttccctcctccccttcccctttcaccctccaccctcacccacacactctcaatttactcagtagatcttgtctatgtccccttctcaggggaaccgtgtatgtctctcttagggtcctcgttacctagcttctctggggttatggactatatgctggtaatcctttgctctatgtctaatatccacttatgagtgggtacatactgggtttgtctttctgagtccggtttacctcactcaggatgatttcttctagttccatccaattgccttcgaatttcaaggttccattggttttttccatagtactccattgtgtaaatgtaccacattttctttatttgttctttggttgagtggcatctacattgtttccaggttctgactattatgaataatgttgctatgaacaaagtcgagcaaacttccttgtggtatgagtgtgtatcctttgggtatatgctcaagagtggtattgctaggtctttaggtagattgattcccaattttctgatcctaatcattttactctcagatatttgtggagtttctgtttatccatattagcaaatactgtgattaattattatcgtatatgacttttaaaatatattggaagggctaaagacctggctctgtggttaaagcactgactgctcttgcggaggatcaaagtttggtttctggcacccatacctcatctcacagccacaagcaactccagtgcctgatgttcccatgtcctcctctggctcccataggcaccagggtatgtgtgtggtacagttacatacatgtagacaaagcactaacacacataaaatgcaattaaataaatctttcaaaaatacattggagttcatctttaagacagagtctctgaaattaacttaagaattagtggagaggggatggagagttggctgctctcccagaggatttgggtttgatccctagcactcacgtggcagctcacaactgtcggtagcccttaccctgtgggatccgccctctctggtctcttcaggcaaaacacccatgtgcataaacataactttttaagagtaaagattaatggaaatgaacttccaacataagggatatctgacttaaaacaactccaatttctatagaaatttggataatctgagcaaaggcaagtgagatattttaatctatatatcttctaatataatttttatcatcaattacaattatatggtgactacagacaaactcttgcagcctggtttgaaatctaattttatgttctaaccattttctttaaggtaaatattatatgcattatatgcacacacacatacacacatatatatatgtgtgtgtgtatgtgtgtgtgcaggtgtgaattcatgcacagccctatgtgaatttatatgtaccatgtacatgcaggaacctgagcaggccagaagagggtgctagattccctggaactggagtggtttgaataacaatgtagttgggtgctggaaactgaaccaagatgctctgcaaaagcagctagtgctattgaccaatgagccatctctctaaatccctaaaggttttcttaaaccattaggcttacttggcaaaatctcttttaccatatgcattttagtataattttctgaacatgcaatttaaaccactctcctaggaatgagtattttctgtctctatattgtattataaataatatcaaaatctatattaatggtgcatctctctgttaggttagcatctcaaaagtaagatagccaatggcaggctattagtaactttatatatgtatccataatacacttcagaagggagagattaatacacactcccaacaacagctactgcatgcttgcacatctgcagaacgcaaacagtaagcactctaattatgtcgactagtcacacctgaaaccatttatgcaaatgacccaattcctctgagattgtccccaggtgtatggatttacaatccgattctcttgcagatctgttctttgattcaaaggagtcggtttatatcgctgttgtgtgaagggtgatggagaaagtgcggacaagacaaacttccaccacagaggtatttatcatcttggctcatctatcattacagacccttttggctaaacctatcagctgaggtttaaaggccccaatgggtcattgtcatacacctgtaggattctctgcctgcttgagtattgatttatccattttggaatcccttcccattgatttattaagcctatacatcttgtggtgggcagctcttctgtctataaaaggtggctgagaggactgtttcacaatcacgtgttttacagctccctgacattcatggactggctctgatttgcccagtgttggtatcagtgctaagaggagatacaagtctggcttcagtcttgatgtgttgttggccctgcaatgtgcagtgttgagatgataataaaatgcaatagcccaactcacagcacaagggagaagacacttttagccaagcaggtttcacatcatttgaaataaagaaaggatggagggagagacacccatgaaggaactggaagccgccttggtgaagagagtgggaagtacatagcaggtcctgaaagccgagagatcaagtcagtggccgaatttgcagctgtggcaggcacatacagaaaatctcaccagtgacaggatggttctgccctttgacagggccatggagtctaaagcatcttcataagactcttgaatctgtggcggatctctgtgagttcagttcgaggccagcctggtctccagagtgagtgccaggataggctccaaagctacacagagaaaccctgtcttgaaaaacaaacaaacaaaaaagataatgagcttaattcatgatgttttgtatatgtacacacacacacacacacacacacacacacacacacacacacacacgtatatatcacactgtatttagctaataatattccctcccattactatattctatcccccgacaagccgatcccctttctgttatcatgtcttgtatatgtacatatgtatctatgtatttaaatccagattacacatatgaagcaaaacaatatttgtctctcttttctgccctattatcctctcctgttccctaacccctccctttggacctttcttgcctcttttcattttcatatagaatttttatctttttaattgaagataatattatttgtgtctgtgatgtgtgagtgcaggcacaacagcaatgccgcagcatgcttgtgaaggtcaggtctcttttcccaccgttacatgggttctgagggttgaacccggctatcaagcttgtgtggcatgcatttttacctgctgagccatctctccagcccatatcacatttataaaataaagctactacgtgacaaaacatgagataattgtctgttttactctggctaatgccctcctagtagactagctctcctagtctacccagtgtcctcagttagataagtccttataaaaatatagagattagtagttatggttgataattaagactgagctagcaaataagaaatcctagacattggccagcagcattgtaactaatataagactctgtgtgttatttgggggccctaaagcagcagcagaacccaggcagctgtcagaaagacttacggttacaggtcacagctttaggaaggttgagaaccactggcctaaagcagtatgtgggggaagactgaggtggccggaagtgaacacatgttgatggcatgggtccgcccctttcattcttgattatatcaagaaaccttccctctgctgagtgggaggataggagaaggtcttccttttccctcaggttgtatctcaggacagtctgtaggatccagagacccaacggactcctgtagctgttgacagaccacctccagatcaccactcacaaggctgtctcctcctttggaagcaatctttggctggcatctctagacaagaagggctctgctaaccctttctttacaggatgacagattgcttatactggtctcacaggttaaaactgacaagcttcaggaatgtgagtagcatgaatacagtctgagaagtcactcacattctcacagaagtggatccttctgaaagcaagtctcatatgtttgtagtatgggtcacaaatagaatttgttcctactggttgggagaatacaaggcctctcccaggaacctaggtgttggctgctttttagaatgcgctgatctgcctctctgtgttggggtgaggtatcaaaataattaacctgagtaagttggagccaggtgtttgtccttctgcccttctctgtcagtagaatcagatgacagtgtcccttagtgagggtcatgatggctaagctttaaaaaaaattgaaggataaaacaaatcaaaatgtatgtgctttttggtttttattttgctttagagctaggggttcaatagttgaggcttgactcaaattccctttgtggtgaatgggtgaccttgaactcctgatctgcttgcctctacctccccagtactgaaattataggcatttgctgccatgtctagctcactcagtctggagattgtgaatgctagtgaaggggccagctccccatttcggcagccataacagccaaacacatgcttgccataaccttgccttggtcacttagaggtcagatgcctgcctcgtggcaaggaaccaatcagaagttagctggtggtgctatgctttatggctctgggtgtgctttatggacaagcgcacatcaatgacgcacagagcatagcaaccaccctgggagggcctatgggccaaaacaaccagtttatcaatcaacacagggcaaaccctccaagcctggaggcacaccaatcctgagcctgtgcatacccctagacactctatgctgccctataaagatctgtacgcatcggtttcgaactgtctttgctagccatccgacatggcgggtggatcaaagacctgagctaacatggggttagctcgttaaactacaataaagcctcatgcaatttgcagcaagctctcgaatccgcctggtgattggggtggccgaggtcctgggctaagatcctggaagcctgagctttccgggggtcttacactaggtaagcattctgtcaactgaactacatctccagccccatatcttgttttattatgtatacttaatagtctggcacgataacatatagttccaggcatggaggaagcattgtgttctttggtttaagccagagccctcgcctttagtttttatctggctacctcaccttgggtctacaactcttctgcttagccatggactaagtgctgaaaacagttctctacctaaatgaggtcaggggtcaaatctgtttctgggaacctgtgcagaacacctcctaaagtctgacttcctgagtgttaactggaacacagggccctgaggtagccaatagacacagagcatacatacaagggctgaagtatcctatggagtataaatgacaaatgaccccaaagactcaatgtatgtgaacacttggtccccagatggtgtcaatgtttggggagtggggcagaaactttcagagatgcagtcttgcaggagggtgtatgtctctgtaggctggctttgaggttcataacgttgccctacttcctgctccctctgctcctgtgtgcagatgaaaatgtgatcagccatactttccctgactgccaccatggctttccaccgtgacagactccagctctctggacccgtgtgttaaaataaacccctttctcctctcagttgcttttggtcatggtatttcatcacaggaacaggaagggcactttcacacatccttccctcacagtgattgtctgggtgtctctaggaaggactgaagatcaggctggaggccagaggtagggctcaacacaggtcagtgaggaggcgggacatcaaggagccagagagtgacagccacatttaaaactgtccttccaagttgttatgaaaggctcctgtgaaggcagaggtggaacacgttaggctgattttcttttaaattctaaatatttagaaatacactatggaagctcccgtgtgaaccctctgagcaccacacacaaaactgcacttctaaaaatcagaggaaagaaaaacacaataaactgggattcacatcagatttaaaaaaaaaaaatcacctgagattcttaagaaaagtacaaatctgggctgagaccttctgggtattcggtctccattggcttatgttaggacttgagaatacgaattttaactagtttcccaaattttaattggattggttttagggtttttgtttgtttgtttgtttgtttgtttgtttgttttagatagagccctgctatgtagcccagaatagccttgaaataagtgtttggtctacttagactaccccagccttccatgtgctaggatgacaggcatgggtcaagacacctggctttcctgattgggctaaacagaggtatccaagcactgtctattgttggagaattcttggtggaactaggaatttcattgacagacaaatgaaaataaacaactaacacgattttgaactattatcaacaaagtatgaaatcaacttttgtatgcagccaaaattaaagtacattaagcaatgttgttccctaccgcgtagtccccttggaggttagaggcctgtcccaagcaagcagctattgctcagaaacctgtgacactaatttttttcattgcctttagagccacatctgaaagccaatctcattaactccacatcacagtttgcatttgacagaaagcagcattatccagaaggatggcgcgtattacttagcagatttagttcctgtattctccaagtcaaataagtaataaaagaagatctattatataaacacacctgtttatttcagcctttctactgaaaccacactaacgtgagggtggaggaggaggtgccaatttacaaagacaaagaaagtgaaacagaagacaactcaactgcaggagtcagctttacaaaaagctgaagtcaatggggaggtgtccctgagcttggcagcaaggaaagctgaaccctgaacacagtaaggaaaacaaaggcatggactgattttacctctgaacctgcttctggaatcagaggtcacaagcgactttaaggaggcgtgtaggctttgtgtacaaacatcagaaaactgagtagttggtctaaccagtaaagagcattattgccttgggaagaagaagtcacagttggagcaccaactctgccctcccatgttccttggctctgccctcctctgagaatcgaatatgacctcagccagtaaacagaaggccacccttggtggtgctcttgaacaccagaaagcattttctagaagccatgtcctctgcttccttttttcacctttccaaaatcttgtcacattcccactgctgttgttttgtttcagcttccggtgatgaaacacaaaccacaaaactcaacaaatgcatgtggagtttattgggaaaagggaacaaagggaagggtaggtgttagcaactgggaacagggatggaaggggaaagaagaaagaagaagggagaagggagaagaaaggggagagggggcgaacaggtgggaggcactcgctcaaaaaggggaagcttgcacatatgtagggtccttacacagccacaaacggcatgacgtagccatacaacacagggctctttgagccgtctaaggatctgcctaaatgttagtgtgcataccctgccagttgtcagggagtggggtcagcataatgcctgaatccttatacctacacctaaccctgactgactgtgaccattcaatatccaggccctggggctaggctccccctgttgtatcacttggctatatgttccacgagtgagtagaaaggggccagaacagcagagctgggtaagagggaccagacactgagaatggagtcctggacgcagcaaggcctgcctgctctatggctgcgactaatgctctgaattaaaatccagccactcatgtaacataatgttgtatttggaggtaattttaagaaatgtgcttcaggatggaatttacaaagatccacggcgacatgtttccaattttagtaattcctaagccattgttttcaagcactgcgtaactcctttgtaattctcatttatgtccaccccatcattgcatactaaaaccttgaaaaaaatctactgtggggcccgacctctgcttgccctctttgggatttcctggcctggagactggccccaggcagatcaagccatccagagtctgctgacatcaaggtgctagtcctgcctccacttaccaggagagggagtgtctcacacctgcctgcacccatcctgagacccatcagagtactggacctacttgcacccacctgaagagaaccttggatccatacccaccaggagaaaaagaaaccccatctgcacccactggaagaagggatgggaagacaactatataaaagcacattcaacagcagaaaaaccaacatgacgccaccagagtccagggactttataccagcaagacatgaacatcccaacacagatgaagcagaagagaacgactttaaaaacaacttcatgaagatgataaagatcctaaaagaggaaatgagaaaatcctttaaagaaatagaagaaaaaacaaacaaaaaatttcaagaaatggaggaaaagacaaaccaagaattgcaagaaacaattcaaacagtgcaacgttaaaaagctgaaatagagacaataaaaaaggaaaaacacagtctgagggaatgctggaaatagaaaagctgggtaaatgatcaggaactacagatgcaagcataaccaacagaatacaagagatggaagagaaaatctcaggcgtaaaagatacactaggagaaacagattcatcaaccaaagaaaatcttaagtccaacaaatccctaacataaaatatccaggaaatatgggacaccatgaaaaagccaaacctaagaataataggtatagaagaaagtgaagaaacccaactcaaaggggcagaaaacatattcatcatagaaggaaactttcccagcctaaaaaaagacatgcgaatgaaagtacaagaagcttacagaaaccaaatagactggaccacaaaaaaaagtccctttgccacataacaatcaaaacaccaaacagacagaataaagaaagaatattaagaacagcaaaggaaaaagatcaagcaacatataaaggcaaacctaccagaattacacatgacttctcaatggaaactctgaaagccagaaggtcctggatagatattctacctacactaaaagactatggataccagcccaggttactatacccagcaaggctttcaatcactatatatagagaaaacaagatattccatgacaaaaccaaatttgaacaatacatatccactaacccagccacacagaaagtactggaaggaaaaatccaacctaaggaagtaattacattcacaaaaatataggcaataaataagtacactttactaaaagccaaaagaaaatgtatggtaaatccacacacaataccactaccaccaacaaatccaaaacaaacaaaaattaacaaccaatggtccttaattttcctcaatattaatggtcttaactcacctataaaaagacaaaggctagcagaattgatacgaagacagaatccatccttctgctgcatacaggaaacccacctcaacttcaaagacagatggtacctcagagtaaagggttgggaaaagattttccaatcaaatggacccaagaaaaaagctagtgtagttatactaatatttaacaaattagacttcaaactgaatcaatcaaaagagatgaagaaagtcatttcatataaaacagaaaaaatacatcagagagagaacatgcaaattaacaaaatcagaaatgaaaatggggacataacaacggacactgaggaaatccagagaatcttcaggtcatactttgaaaacctgtactccacaaaatttgaaaatttaaaggaaatggacaattttctgtattcatatcacttaccaaaattaaatcaagagcagataagcaatttaaacagacctataacccctaatgaaattgaagcagtcatcaaaagtctcccaaccaaaaaaaaaaaaaaaagcccagggccagatgtttcagctaatactaatactcctcaaattgttccacacaatagaagcagaagtatcattgccaaactcttttcacaaggctacaattacctctgtagtcaagctacacaaagacacaactaagaaagagaactactgaccaatatccctcatgatcattgttgcaaaaatactcagtaaaatactggcaaatcaaatccaagaacacatcagtgaaatcatccaccatgatcaagtaggcttcatcccagggattcaatgatgcttcagcatacaaaaatccatcaatgtaatccaccatataaacaaactgagaaagaaaaaccacatgatcatctcactagatgccaaaaaagtctttgacaaaatccagcacaccttcatgataaaggtcttggagagatcagggataacaagaacatacctaacagaataaaagcaatatgccgtaaaccaacagccaatggagagaaactcaaggcaattcctctaaaattaggaacaagacaaggatgcccactctctccatatctcttcaatattgtacttgaagttctacctagagcaataagaaaacaaaaggagatcaaggggatacaaattggaaaggaagaagtcaaactttcactatttgcagatgatatgatagtttacataagtgatccaaaaaactctaccagggaattcctacagctgataaacaccttcagcaaagtggcagggtaaaagattaactaaaaaataatcagtagcgccgggcgttggtggcgcatgccttcaatcccagcactcgggaggcagaggcaggcggatctctgtgagttcgagaccagcctggtctacatgagctagttccaggacagtctccaaagccacagagaaaccctgtctcaaaaaaaaaaaaatcagtagcagtactatatacagacaataaatgggctgagaaagaaatcagagaaatatcacccttttacaatagccacaaacaacataaaatatcttggggtaacaatacccaaaaaagtgaaagacctgtataacaagaactttgagtctttaaagaaagaaattaaagaagacaccagaaaatggaacaatctcccatggtcttggaaggtagcatcaacatagtaaaaatggcaatcttgccaaaagcaatctacagattcaatgcaatccccatcaaaataccggcacaattcttcacagaccttgaaagaatagtactcaactttatatcaaaaaaacaaaagacccaggatagccaaaacaaccctgtacaataaaggaacttccagaggtatcatcgtccctgactttaagctctattatagagctatagccctgaaaacagcttggtattggcacaaaaaaatagacaggtggactaatggaataaaatttaaaactctgatattaacccaaacatttgacaaagaagctaaaattatacaatggaaaaaagaaagcatctttaacaaatggtgctggcataactggatgctggtgtgtagaagactacagatagatccatatctatcaccatgcacaaaacttaagtccaaatggatcaaagacctcaacataactccagccacactgaaccttttagaagagaaagtggtaagtacccctgaactaattggttcaggagactgcttcctgaacataacaccagtagcatagacaccgagatcaacaactaataaatgggaccttctgaaactgagaagcttctgtaaggcaaagaacacaaagaacaagacaaaatggcagcccacggaatgggaaaagatattcaccaacctcatatctgacagaggactgatttccaaaatatacaaagaactcaagaaactagtcaccaaaataccaaataatccaattaaaaattggggtacagaactaaatagagaattctcaataggggaatttaaaatggctgaaagaaacttaaaaaattgctcaaccaccttagccatcagggaaatgcaaatcaaaacacctcatgttagaatggctaaaatcaaaaacaacaatggcagtttatgttggagaggatgtggagaaaggggaacactcctccattgctggtggaagtgcaaactcctatagccactttagaaatcagtatggcgattcttcaggaaaatgggaatgagtctccataagatccagcaattccactctcaggcatatactcaaaagaagcacatttatacaacaaggacatatgttcaatgatgttcatagcagcattgtttgtaatagccagaacctggaaacaacctagatgcccctcaactgaagaatggatggagaaaatgtggtacatttacacattggagtactactcagtggggggggggagcaatggaatcttgacatttccaggcaaatggatggaactagaagaaaccattctgagtgaggtaacccagtcacaaaaagacaagcatggtatgtactcactcatatgtggactttagacataaaggattaccagcctacaatccacactgccagagaagctaggaaacagggaagaccctaagagagacatacatggtcccccagagaaggggacagggacaagatctgtgcaaattgggagaaagggggggggagagggagttagaagaatgagaagggagaagaggagggatgcagaggtcatgagggagcagaatggttaagtcaggagaaaaataagaggaaagcaataaaagagataccataatagagggagccattataggtttaaagacaaatctggcactagggaaatgtccagatgaccccaactaagattctaagcaatactgaagaggctatcctaaatgcccttcccctataatgagattgatgactaccttatatgccatcttagagccttcatccaatagctgatggaagcagaagcagacacccacagctaagcactgagctgaactcctggaatccagctgcagagagggaggagggttgagcaaaggggtcaagaccaggctggtgaaacccacagaaacagctgactgaataaggaagaactcatggacccccgactgatagctgggaaaccagcataggaccaatcctgacactctgaacctgggggcaatcaggtagtggatcagtatttatccctagtataagaatggactttgggagcccatccacatagagggatactctctcggcctagacacacaggggagggcataggccctgctccaaatgatatgatagacattgaagattcccacccccccatggaaggcctcatcgtccctggggagcagaaaggggatggggtcaggagttggcgaggggcaggggaaaaggggagggaactgggattgacatgtaaaacaagcttgtttctaatttaaattagaaaaagggaaaaatctactgtagggaaattcctggggcggggccgtggcaggagctgaggtcaggatctagaacccataggaaggcaggcacggtttgtggtgagggaatctgtaaagccagtgctcccacagagagattggaggtgaggagaagactctctggaagctagagacagacaccctgcatgacaaagaggcctcgtctctacaaggtggaaggaagaacggatgccgtagttgttcctgacctccacccttgagctgtgactaacatgcacacacgttagggcaggagagaataacagcaacgacaataataaaggtaatagtaactacacaggaagcaggggctaaccctttctggacccttattttgccccacctcagttccaccaaagcctgtgagttatgggctcaacgacagcgctggcaatagatacgagaaatgcaagtaattaaaaggtgtcaagggtcaaggaggtgggaatcagttgaggcccaactggggcatttagctattatattgctgcacccttttaggcctcttccagcttataaatattaatttaaagactaccaacaaggagtaaacggatttgggcataaaccttcctgtcaggggtgatttatatccaataaaaggagagcaggatagagaaagcctgcttcgctaagtttacgatagacagtgaaatagtaccatcaaaataaaaaggattgcagtgttgggccgtgtgggtgtttcccttcttaataagcagtggctagaactgtattgtttgcttttatcagggcctcacacggccgagggaaacttctggattgcccattgtacatggacagatttataggctcactgcctgagcaagagcaccgagattattaggacttaaaagataatagcaccagcaagaaaattaaaactgctttcccgacttagatttcatcagcgcatggcaacagctctttctacaccctatagtagtataggaatttgttcaaagtaagatctgtctcagagtccgtgcaggaatggctccgtaccagaaaaatctgcagctacattcacaggcccacaggggtcctgcctacacatgaaagtattctgtggaggctgggggcaatggcccaatcagtaaagtgtgtggggaactgagttcaaatgaatccccagtacacacaaaacagtgctgggtgtggtagggcatcagtgaccccagctgtggggatgggaacgtaactatggcaaagccttgaaatcagtctgggagaaggaagagagcagggtatcatgactcaccccagacttttaagtggcaatatctctgtgttacacaatgctcagaactcaacagtgttgtagtcttagtgttgtgtgatatgatgggctgggggcccagatacagaaagcgtttttcttgtgtctacatgattaaagaaagatgcatttatgcattgataactatgcctattataagttcatcagaacttctagctttaatataatgtacaatttgttggggttgcttgtttggatgtgcaaataaaaccacaacttcactttgtaaattttaactgttcgtgtgtgtgtgtgtgtgtgtgtgtgtgtgtgtgtgtgtgtgtgtgtgtgttaaggtctgtgcttataggggcagatgcacttggaggcgagaaacatccgttacaagcagttgtgagtctcccagtgcgggtgtgaagagccaaaccctggtcctctgcaacactaagatgtgctcagagctgacgagccttctccaccctgcacaatttcactcctgcttccctcacaatctgactgtggctccattgtgggaactggacacaggatgttcagccattgggagttactgcttccccagggcttactattccattgcaagagctggcattcatgcttaaggatgtaagggccactgtggccactgtcacttgttctcaggtgcagaacaccctgttcagacacctcacctgggagggcgccgctgtttagccgagttttcagctatctacatttcagagattataggattgttacgaacaaggtggcctgggagggattcatataaagtgctaagtctaatggagtccatcgtaaaacacatggaggcatcaccaaagttccacctggagatcacaccaggactcaaaaataatagggatggatgtgcggcaggcgggaagcctggaatgaagagagcagtgtggttgaacaaagctttgatggtggaattaacatgaaacaaaggccctccgaggaagatcagtctgcaaagaaatgaggaatacataaaagtttgtttaatttatgggatttctatgctgctgaccagtaagtgtaaagtcctgttcccctggtcctcactatcactcatgtatcacttgtcagtagctgggatgcactcggaacataacagctatggtaatatttctgttcccactgcagctttacggcacccaggaaactctgtaatctttaaattccctcactgttaacatctgctgaaacattattggtcccagcatagccaagctgctcagaaattacatttagcagagtagttaatgctaagggtgtaattctagacacaaccgtgtctggaaggggctttaactcgcccagtgattgtgtttcttttaggtttttctttctttcgtatctgtcttgtgtcaaatactcattggcttgagtgtgaacgcttcacaaagccagcgagatggatgaacggacacatggaagcacacacagcgtttagtattgttcaacaaagaccatcttatataccagtcctttctattctattctgccagttacctcttttcctgtaacagttacacttacttttttaaagatttattttttaattacttctaattctgtatagatgtatgaatgcagtggcttcagatgtcagaaaatgggctaggggagtgcttgcctagtgaacacaggttctggatccagggtggatctctttgagttcaaggccagcctggtctacagagcgagttccaggacaactgaggctacattatagagagatcctaccttaaaacaaaacaaacaaacagatgtcagaaaatcagatgcccagggtctggagtcacaggcgtttgtgagccatctgatgtaggtgctgggaactaaactcaagtgctctggaagagcagcaagtgcttgtaaccactgaggcatcgctcggtccctaaagccttttaaatgaaaagaaagtcatcactaaagatatgattgtgaacatttagcagtttgagctaggaaatccaacaaattcgtataaattcagctgtttacccttatcatgttcatcctccatccttctgcaaatgtgcatgtaggaaatcttagatttgagatccaagcatcctctgatcaacgagcagcagcaaatgctaacttgctagccggctttccagagtcaactctaacaaagagaagactctgtgtttccttcccctcctaggcctcattactgctggggaactgcaagtgcctcggattatacttactgaggcaaggtgcatctaaggaaaaggaaaacatgagagacacaaggctgtttacagttaaaattttggagtttgtatgttgtataagggagaggaaggagggggcagaaggagggggattctttctttttcatccacttcaacacttgtcactatgtgtgaacaggctgcatcaagtcaccaaaaaagatccagtagaaaaatgtatccttgttctctagttcttctgatccctttatagcctacagcccttactaactgatctcattttacacacacacacacacacacacacacacacacacacacacacacacacacacacacacacacacacacacacacacacacacacacacactcacacacacagacacacacacacacacacatacacacacacacacatacacacacacacacacacacacaccacacacacacgtctttagtgcatatctattcagcaggcttcagagagaagactcagtaattttaaggctgtttttccccagacagtgtatgttttcacatcccatgcatgcgtagcttccctcatcacctttaggtagggataaagtgtccagttacttctctgagatacctaccatggactttaattcacatacttggaaccatagtaggaatttgtcagaagtacaaatgattatgaaacgttttagtcacatgaccttatatcacaataggcaaactggggaatcccgatgctgtcattctgggttaagtgtttgtcacccagagcatatttctatctttttttaaagttattatatttatttcaaggtatgagaatgatggtggtaaggattccttataaaaacatcttcagaaatttaaacatgaaaagagattcataaatcacaaatcctgcattattataataattgctgggataacaacaaaatgcttggtctccttcatatgagatgcattccctgctagaaagtgtcctagtccttgtttatcacaatgaccataacatctgctgaacaacttaacagagaggacaaagctagattttagatacaggccagaatcaacaagatttaggaacaaagaggattaaaaacttaacaattagcatacagtcattcattcaacaaccatctcaactgaatcgtctatgaaatgctgccctgggttctgtcaggtgagcaatgactttatatttagtgatctgagaacccttaggcataaaatataagataaaccccagcttcagtgtccaagaacgtgaaccttgctggaggaagcaaacatttggctgcagtctggtgagaacaaatgcattgcacagaggagcagcaaactaaactgtttcccgtgggaaaggtaggtctgaagagaggatgaactgggcatgagagcacacactgttgtccctgcacttgagaaacctaggcaggatcaagagtttgcagccagcctcggctacagagttccagaccagccacgtacacacagcagagcctatctcagaaaacacaattaaataggaatgaacaaaaatccatatgccagtcagaggaagaggcatgggagagcattccagaaaggaggcgcacgtcctgcttacacttgcagtttgttctgcttttgttcggactcatgaatgatcaactcaaagagtatggagtgtctctaaaagcatttggtgggttctacgtaggcattaccctgaaaattctgagaaggtctctatgaacttcagcgttgagaagagagccagtgaacgcactgaagagaactgaagagaattgagccatgcatggtacatgatgtttccactgtagattcggggaatttatctatcatctgcttatcaagcctctatctatcatctattacctatctaccaagtttctatctatcatctatttatctaactactatgtgtctattatcatctagctatctatcttttatttattatatctctctctctcatacacacacacacacacacacacacacacacacacacacacacaccatctcaagtatattataggctctttgccagcataaatcacatgcctttcctatccacccttcatgctacccattgctttatatacacatgaatatcatacagttcttcatctaacggtttgagtttggtgaaggttgagtctgaaagttagttattagaaagtcatgacctcattttatttactgggaaaattcagagaattccagagtccagcacctgaaatctacttccttcccacaaaagtggtcaccatgacaacttctgaaggtgatgaagtgtgtatatattcttacttactaggctcacagatcatcttaattttttatgtatgtcattagcaaagcctagaaatttgtctacttatatatgtgagcgtctggaggttacaagctgtcctgtgactatcttgaagtatttccgcctggtaaatccagtctctgcttttgagggcttcaattgttagcagtgatggaaccagtggccaaagcttggaaccaaatatgcaatttcagtgtgacaacccgaataaaacagtttatataagacaagagagacacaaatccatccagaaacttgttatagaattgtgataagacacactgtactatcccatctttagtagccccatgtgcagtgtcaatctgtagtagccgtctgcagtaacctgtttttgtgggcttcagtcggatacagccaactttgtctagttcgtacctgagaggaggagtgtggattgagaaactacatgtaaagatgctaaggaaaagacagagacacaaaacagagtcatgagagcaatccagtgaataatgaatgccccaagtttattcttcaaagttcttaaattccccaaccaaaaaggtcgaaatggcaaaagtcttctttatcatcatacaaggaagaaacagaccttcttccttaattctccaaacatttggtaaccacgccttagactaaatctctcattatctgaccttgagggttaagagtaaccaccccgcagactacgtctcttgttatttaataagacatctacgcctaagaccaaacatcctacagtagccacacattagacctttaggtcttatgactttaaccttggaagagtaaggatagttttgatctctctggccttaagtcaagatgaatcggagccatttttatggactctgacaacacaccaaaatctgaccacatgaaatcagtttgcatcaggaaatttcagactaagtaaaaactgtgagaaatgttttcattctactaatggcagccagcctgacaaggacctgtatttctagaaccttctttgtcccttttgtggcaactagacaattgcatcagacttcaaagtcgagttcccaccaatgtgatgagatgtggtcaccacctgtaacagggataaaacgcagagaccactttggtgagtgtgtttgttagaccagtttgggttctgatacactcttttcacaaagagaaatctccctgcctaattacgtccactttgctcttttcccagcataactatgagaggggttttgcttactaatttctatcagtatactatcttaatatagaatttgctgacaaaaataccttgtgtaaaattatcaaagaattaatagagatgattttagcattttttaaatatttatttattagagggcttgtgtggaggtcatagggcaactggctgaaatcatctctactcttcggcctttgggcttcaccctcagggtccttagattagaagagcaggcccctctccctgctgagccatctaaatggccctaaaatactttttaaaaagttaatataaagagaacatttacttttcacaggtttccacctatgtacttgacagacccaagtcagtcttcggaggcttgtccagacagctagccactcagggctcctatccagacctgtccttccagggatgtgtgctgtcacccactgattccaggcctagttttgctgtatgaagtggctccataagagctgccctcccctacagcacatccctccctgggagagagaatcaaggataaaaggaattgtccctggtatatgcaggagtcatgagacatttgtgggcaaaccccgcacatagagattctgaagggagaactccccttgaagcagagctgagcctcctcctagctttatcaggccctactttaagccccaatattccacatttctcatgcaaatgtgtctaaactttctctagccctctccctcttcaactcagagtttttgcagagaagggcttgtctaaaatttttgaaacttactaagtagcattttctgccttgcctcgcctctcagacagcttgctgctcttcttggctgctatctagggttttcatttctctagctgcaccgtcatttaaatgtttcacaaacggtagaggtgagccatctaataaatttgttctaattgtcttttatattccaactgtggatgtcttaggaggtatatttagggctgagaaaggcatttttcaaaagaaaatatttggagaagctgcattaaaattgagtgggaagttaaagagctatctcgtgtctgtgctaaaaatcactctgggccgtgttttaggagctgattagtacatacagcaaactggctgcatgcgtcaagttttaattccaaggcaaatgttcatacggtaccacaatatgctcctgcagccctgatgctgcaatgtcatgtaatgatagtctcagtgacacctgaattacgttagatggctcagctgacttttgcagaactttgccagatactgtatttgcagatgacatatgtcaaattccatcatcaactggctcaaatttagatggttcaatggttaagagtacttgctgtttctgtagaggatcagagtttggttccccacacctacactgtgactcacaactccctgtcactctaaccccagcatatctgatgccctcttctggccgtcacctgcactgcactctcacacacacaaaatcacacacagacacacaccagcacacaaatagaacttttaaacaaacaaacaaaacacccccaagcacttattgtattataccttgtttatcagttctaaatgatcaaattgaacacaaaaccagtgaaggcaattccctctctcatttttgaagcgattactttaaaacgtgtgattctgaactaaatgaactaaaatgtacattacaaagagctaccacgtaaaccaagcatacttgtttcatcagaaatctacattaccactttaaatttttttgagatttatttttattttatgtgcatgagtgtttcacttgcatgtctgcctgtgtatcacatgcattcagtgaccgtggaggtcagaaaagctgtcaggtctcctggaactgaagttataaatagttgtgagctgccatgtggatgctgagaatcaaacctgggtactctgcaagagcagccagtgctcctaattgctgaaccatctttccagctctctctaaatagctacttttgattcttatatgcaatcaaactttgctttattagtagtggacaatgtgagtatgcctcacaagtatacaaataaaatatctattaagattattacttattattattttgagtggatgaatggctgcttcctctgaactgaaatattccttccaggagggagggaggggtccatgagaagtaggagatgcatacaggatcacatctagaagaatggggtgttgaaaaattctccggggctctgcactagcaatgtcagagggagtggtcgactcccaagaacaggactgaccagcccagcatcacggaagatactcagactgtgggactacctggaagtcgtgtagagagtgccagggctgcctcaggagttatcactctgttgggatgagcttttcagtgatgtggctgctgctctcccacacaccctgttaggaaccccaataaaaactctttagtttgcccaaccgaacttggctgcaatccttactttggtctgtggggatccctctctggggtgagtccacatgtgtttgtctccccagggaaagtctaccaccctgatgaatacgaggattaaatgttgtgtcagtagagactttccctcctccatctgcagacatttaatttctgctcctgacacataagaactgtggccaactgagaacaggaagagaaatgagatctgaccatgtccttggggatttagaatcccacctcaaaggaaaaaaaatggggtctgacatttaaaaaaaatgcaataagtgtgtcttgtttgtcaactggtttgtatctggaatgagctaagagatacgcctatgggtggatctgtggtgtgatttccaggaataattaactgaagtggggaagattacacccccccagaataggtagcacctagaagctgtagcccagatcaaagggttctgagggaaaagcccagctggctgcttcactccttccatctactctgttgctgcttctggtgtcatcactgacagcagaacccagactccccagttttccagtgtggactgaagactaatggctctccagagatcccccaggccttcagcatcatgttgtggtgttgagacacccagccttatggacagaacagacattgcatcctcagtctctgcagggtgcagacggccatcgaccaactcacatcatgtactgcaatccaatgagcctccttagtgatgtgccttctattgtcccatccctctagagaactctaatatggattgtagtagagaactcacaaagatgatgaccggaggttgtgagtaactgcccccctcactctggtcactctgggaagggctcgctgtagagatttggccttctctagacagcaagttccatgtgggtatcagcaagcggctagctggcttctcacaaggtgaatgtgtcacaacacaaacctcacttccctgagtctgttcaggcttcaatgtcagcctctttcagagcctagagagctcaccctgtcttacattctgtgtttaccatcacctcccactgataggtgattctggaagtttcatttccagcacagacatctccctcaatctccacacccagatgttgcccttggaaaccccaccgatagctctaatttggtattcctgaggcaagttcattttgaggcattgcatttattcaacatcttctcctctcaggatgtgggtatgggggtgactgctaaggggcatagaatttccttaagaggtgaagaaaaggtttgggatgtgtggctttgtccaaatggtttgcaaaataaaaagcaatagcccaaatgacacaacttagaacagatagatgtgtgtgtgtgtgtgtgtgtgtgtgtgtgtgtgtgtgtgtgctcacacgtgtgtgcatatgtgtgggtggaatatatctcatttgaataaagaaacaagcaagcacattcaatgtccccagcccccattcaatgtcccctcttaggaggagaggtggcatcacttagaacccaccccaataagaatctttgggcaagcactaaatttagtgttttcatatactcctatggatttgagcgagagtgaaatctcttctagaagagtgtccacatgacctctgccctgatcttgatggcacctgcgttctatcctgcctactgttgcatcctctcacactacccagcacagacaccactatgacagtaaattgcaagatgtttttctgacaatttatttgtaatctgtctttaggcccacacttaagcctctggaggcctgggaccaggcttgatatcatatcaataggctagaagtgtgccctatagaaaaaaaaattaaatctccaaattcttagagatggcacttcagttttagaagcttaaccctttcaaggcagccttcaaggctctagtatgaagattggtgtacagataattcctgaaccatgtccctgactcaatttgtttttttcttctgctgcatcctcttcagtgatttataagcttttactagagagatgggggggggatcattgtgttgtagtaggatcatgggacatagcttctggctttctctctcttcaaatttactggccaccaggtgttagtgcataacccttttagcacacactcctgctcccttatcatagacccagagcaatgggtttaagaggcaatggactgaaaccttgaaaatgaaaagccaaaaaaaattcttttataaaattagttggatatttctggtattttgttatagcgacagaaagctgaccttcacatggagagaacaaaaggacattcaacagatgacagatttttttttttccaaatctagctgtactgaaggatcatggccaggcagctactctaaactggtaataatatggcagtcactcgaaaatctgagttatcggtggcatctccaagtttaaattatctttagtcatttgggattcactacatttgtttgtttttatttgacttctcaaaatgagtcattaagtgaaattgccttcggacaaacatggaattcaaacaaggtttaataatcatgtacaatcaaaacaaaaataacatagagataaaatactgtgcttaatgacaatttctgtcggtgaagatggagtttaataaggaaaatgtatccctgatactcagttattgtaaagttggtccggcagaagtgcagtctctgtgtactgtaatggtttgaatgttcccccacaggctattgttttgatgactcagcccccagcttgcgtcactctttaaaaactcttgagcctttaggaaatggaacctgactggcagaagtggtaactgtgggtgagccttgaagttatactcttgtttgagcctgaactgttctctgctccctggtctgccaagatatgaacagcaacctacaagggttacagatggttgtgagtaggactcatgggtaggacttctctcctgctaccatgatgtttcagtcaggttctgtagcagaatgaatgtctctatcatagatacataatgtatgaaaggggttgattagaatgactgacaggctgtggtccagttaatccaacaatgactgcctgtgaacagaaggtccaagaagaggctgcatgtttcagctggtcttcagtagatgtcggaatcctgaagaattaggagctaatgccagtgaagaaatggactcactagtgagaacaaacaggccgaaagagcaaagcctcatcctttcatgccctttatatagacttccagaagaaggcctggccaaggttaaaggtggattgtcccacctcaaagacatgggttagaagttggtctttttgacaaacacggtgtgtattcactcatatatggattttagacatagagtaaggattaccagtctacaatccacacctccagagaagctggaaaacaaggaattccctgagagagacatacatggtccccaggagaaggggagagggtcaagacctcctgagcaaattgggagaatggggggggagctaggagaaagagaaggggagaagaggaggagagaggaggacatgagagaacaggaagattgagttgggggaagaatagaggagagcaagaaaagagataccataatagagggagccagtataggtttaaagagaaatcaggcactagggaaatgtctagagatctacaaggttgaaatcaactaacaatctaagcaatagtggagaagctacctaaaatgcccttccctgataacgagattgatgactaccttaaatgccatcctagagccttcatccagtagctgatggaagcagaagcagacacccacaggaaaacactgagccaaactcctggaatccagttgcagagagagaggagtgatgagcaaaggggtcaagaccaggctggagaaacccacagaaacagctgacctgaacaagggggagctcatggaccccagactgacagctcagaaaccagcataggacagaaccaggccccctgaatgtgggtgtcagttaggagacctgggcagtctatggggcctctggtagtggaacagtatttatccctagtatgaatggacattgggagcccattccccatagagggatactctctcaggctagacccatgggggagggcctaggctctgccccaaatgatgtgacagactttgaagatccccatggaaggcctcaccttttctatggaacagaagagggatgggattcggggtcggtggggggcatgggaggatgggaggaagagggaactgggattgatatataaaataagattgtttctaatttaaatttaaaaaagaagtaggtcttttcacttcaaattatttaatgaaggaaaaaccttcacatgtgtgcccagttgtttgggttttaattaattcctgatgtagtcaaattgaccaccaatagtagtcaacacacatgccttccctgccatgatgggctgaaatctctctgaaaccatgagccaaaacacacctttcccagtttccatggctttagacaagcattttggtcacgagacatagaaccaatacagtcccttgtggcattagttacttctgttgctgtcatgaaccatcatgaccaaaggcaatttaaggaggacagggccgattctgtcctatggctccatagcaataggagtccattgtgacagggagggttgtcagcaagcggcagaagcaggaacgatgacatcattcatcacaagcagaaagcattgccctaaaactggaagtgattcaagtctttacacctccaagtccaccccagggacacacttcttccagcagggtgccatgacttccccaaacaacaccatcaactggggaccaagtattcaaatatacaagtccagggcgagtaattctccttcaagacatcacactcacataatttcctccataggcctgatgtttcttaatgtagttttccaaagtccagactttgtgtgggataaaaaaaaaatactccttttgaaggctgttaatcctctagcaattcaccgactaagtaaaagttccctgggtgaagaagagctggctgctatcacgccccacatcttttattgttagtcattcttgatgtcaacagatgctcaataatttatttattcactcaaaagatattgatttttaatactctcctattacgtgccaaataatgcctgggcattaaaaattaaaaggcctggagttggggggctgggacatagctcaagggattgagggcttctctcggacacatgaagcccagggcttgatccctaatctcacatcaaacaagtatggcgctgtgcaactgtgaattcagcactcagaagacaggggtagaggaagctctgggggcaagggccatcttctgctaaatagggagcccaaggccagcctgggctacaggaaaccctgtctcaaaaaaaagaaaaaaagaaacagaagagaagaaagaacagagggaagaaaagaagacaaaagagaagagaaaggagagtaaagtgtgaggaaacagacagaggagcccccttgctgttagagcttcagcctggtgcatgaggccttctatctccttgcggcagccaggacctgcttgacgcctgcccctctgtggctgctccttcacagccaggcaacatggctgctcttcgcaggaaccctgcctggttccactttaagctgaagaaaatgtaaggagttgggacaagtttttagagtggtcgatgagccatttagccactgcttcttcaactcctctttgcctccagaagatgggctcttgccttcctcctgttgcagagttgtctgccttcatctccatgcccaccagctttgggctcacccaggcatcagtgagtcctagacccaatgccgcccagccagtggtctggcctttggccttctttgcagctcatcaactccctgcccatattttcctgctcctggcttcaacatcaccaagctaccttcatgctgaatgtcctctgactttccaggtaagcgctccatctctagttggaaggtatacaggccaggtcattctgatattgcaaagaatataaagagtacctcaggccactccaggaggtcatggagtcatgcttgttgcagaccaggctaggactgtcaacagttgactattccttcacttcagtgaagtgtcgggggtttcctccctggtcatctctgactgcccccaagtgctgtagctcatatgctggtaccttgttgcccatcagagtgacatagagagaaaaacctgcacatgagacagagagaacctgagacaaagctaaagaccactcgcttctccacagtgtcttgattccccgtctgggctgccagggaaggctgtgattaatgaagagatgtcaaagccagaattcttccagccacgatgaatggcgatggatttctgtgagaattacttggggctgaatgggaggagagccagagaaaggaagactgtcgtggttgcaagccatggctgtaccaccattgactgtcccccatcccacctgcatctttcagcacccacaccctccagccctccagtggagccgcaagccacctcccccgttataaatagcagcacagatgttgacagcaaaatgctcccttaattaccatacaaaatgctctacttgagtgaaccgcttaaagcagcctctgaaggaagttcactcaagcaattccgcagattacagctaatgaacaatatttcctcgcacctatttagtgctcattaaaatgtaaaagcctttcgcttcaaacagacgcacaataaataattccgctctcccttctttctgtctcagagcagcttgggtaggaacaggaaagagagggcgctgctgtgggagcaagggctgggctgggagtgggggaggacgaagggagaagagagcaaggaggttcaataaatagccggggctcattagtattctcccaaagccccctctgcctggtaccataggtttggaattcaacagaaagattctgtgcccagacacagatagactacctccaggatgcacagtcggtcatgaggtgcgtcagctgagaaaagtaaccagagcaacaccccaacatctggaagcagattggggtggaccaagataggctgggggtaggaagcccaatacattgctacatgttcttagggatgtcctgtgtttattttatttatttttatctatttgtctatttataggttggggtttagaagatgaatatccaaagactatactttcagtgatgatttctatagttggaatttgtgtctggcaaaccttgagttctttcttgcttcaggaggaaacatacatacggaagctatgaaatatgttcctgttcttgcaaggccctggatcacccccaaggcattttgattatgtaacactagaagcatagtaggtggagaggtgaggtgagctggaagggggtgggggggaagggggtggatacttttcacttggtgaatccctgatcaaaactgatggtgagctaactttctctttggaacaatgggcaaaagatcacggactattaagatctttggctttctaggtgtggtggttaatccccaagttcaactggattggatttgcagtcagtatgctaacacagctctgggactgtccctgaggtgttagaagagaggtttcaatggacgagggaagacccactccaacagtagacgacaccatttcatgggctgcagttctggactgaataaaagcagaacgtgagctgagcaccagtggttgtcactcagctccctgactgtgggcactgtgtgaccagctgcctcacgctttccaccatgacttacctcccagatttgtgggacttaacctcactcacactgtgagccaaaataatcccttccttccttcaactgtttttgtcagacattttatgacagcaatgagaaaagttaactactacactggtggaaatagcaacaccttttgagactttattacttttgcttatttatgagtgggggtgcggacatgtgtaagcatgcacctccacaggtcagaagatgacttttgggagtgagttttctcctttcacatgtgggtcccagggaatgaacacaggtcttcaggcttggcagcaagtgtgttcacccatggatccaccttactggctcccttcggacatttaaatttggcataagaacacaaaggaatgatcatttaaagtacaatatgtgatcaaaaatgccaggttttgttgtagcttgcctgcacagtccatactaggactgagggccctgccagagttgcagaattgaagcaaaagtggtcctgtaaggagccaacaaaaggctaaagaaaaaaaaaatcacagtgctagagtacaataaatgctgttaggaagtactgtagactacaaggacagtagaagctgcaggtgcagctggtgctacattagagccacatgccagagctactcagacacttgttgcttctttgtgtgggtccgtccacatctaaggcgtggggcaagaaggcacagcatacactatttctcatgaacacggatgggcactgctgaaggagaaatcattctgcacttggctttcaactaaggtcacttggaaatgtcctcagcacccatctcctttgccttcttatgcctgccaatttagtgttgtattcaaagtgattaattagtttgtactggaggtttattaggtaatctttctgtcaatcaaaaatcacccagggtttcagcgcagaatgaaggtattttataagaatttatctcattattatattgacaacaagcacggtgttcaaactaattgagatattgctcaagttggtcagaattatttgactctcctgaatatttatgatttgttttccattagtgtgaattcatttctaagatgtagaacgacccttctaatttcttcctcatactacgaattgcacaatgctttcacgtttcttctctttcaagacccacaaaaatctggggcgcattgtaacagagtaaaagattcacctaacactatgcaatgccataactaaggtgaatcaaggatccccagcactcataagaatctatgatggaaagtcttaggctagcccaggccacaccatacagccttatttcaaagaccaataacacaaaatgtattttttaggtaagaatacattcacattgtgctactgtaggaaatgaaccacaaccagagtgaatttccgatacaatgacttactccacactcacttttccctcacctgtgtgagtgtgcatgtatatggtgtgtgctggctgtggtttgtcacactgatattgctcctttgagctccttggaagtgcacacacatatggagtcagatataatcccagtacacagaagcctgggatgcagaaggatcactacaagttcaaaactatcatgggttgcagagttccaagccagtctggcctacagaaggagactgtctcaaacaaacaaaacaagccagggagacttaggaatattctgtgtgtggtacaagccattacttaatgtctattgatacaggaataattacttaagagttacacgtgctttgggcagtgaacaaaagaacattattcttaaatagtttttcacttgctccgttttgttttcatgttactaccctacacattccaaaaatagattccttcctctctgtgtgaacaatgatatagaaaaagatgtccacattggaggatctcggggatgctaggcacccttgctgcttctattttaacataaacagatttaaaaactaaatcataaactgtaatgacattttgattgcagttttcagagggatatgaaaatttcttaattctgaaatgctaacatgattttcaaaggttacccttgctttttgtcttgctcttggagtggatgtgtgtttcttgtgggcttttttgagcagcttgtctcaaatgctcctcagattatcttctcagagaggctgaaggaaactgctggaaaagaagttgggggggacatctataaatgtgaatggaagacacagaattgtgtttaaacacttcacagagcagtcagacttcacacctgccccttgctggagcgtggagatgatgagcaaacaagggtcagtgggccgcagtgttcagggagaggctgctgggacagatgcaaattatgtttttcaactgtttgggtaaagagtcaacaaatcatgagccacacggtgccagaaactctggagtaacctctacgttatccctcatttccttctgatgtataccagaaagtccccttcactggcttacaaagactcacataaatacagatatgtcttgattggggaattgtaaattcagtctcaggcaggctttgtgatcaacctagaacggatctgcagagagagggagagtcagagtgtcatagatgtgatgactgtaaggctctgggggaattttccagaaagcattctgaaagtcagcttgcctgaaaaaaataaaaaagggggacttatattgtgttcaaagtatgtttcccctcaaataacaatacttaattgaatatttcttccactcacccttctcttttcatctgtgtagattttcagaagagccgtttggagcactttagagttatggttttatgtatgtgacatgaaatggcaatacaggctgtcttggcaccttgaaggaagagaaacaaaaattgagcaggctatcttacttgtctcatttgcctggtcccatcatcacaaagtaaatgagttgtttcgttgcaggctttcagaaggattgtaataagcatgtttggtccacaggcagcagggtgcaggctgcccgcatcccccctctgcattagatggatggtgctggtggcgagtggacacacgcgtcctgcctgaatatgaacaacagatttgtcagtgtgtgacaggctgacagcccagctcccagctgcttgtccactgttgttatatcagcaccttgtctgagtgttcagcaaagaggcagtctgcttcctccattcatgggaggcaggttgccgttaaaaaaaaaaaaaaaaaaaaaaggaagaaaaacctagtcctggcttcaggctacagtgccagaatacattgagaaaagagacaatttaaatctctctgtactccgaagcaacacatcagaggccttagacgtcccatcctacaggttaggcttcaaaacaaaaaaggtaactccaatgagcctgttgctggctgaacagcatcatgtcactttggtaagtgtcttggcagaacctgcttatgaaaggaagagccacttttggctttgttgcatggctggagtggaagcttgctgtgtgttccctgaattcagtgttatatggtggacagtttaaaatgtgccagggaagacataacatggtatagatgttcactcaagcatctcaattttactagtcaggtgatggttgataatcactatggaaatattttatgttataaaaatttcagaaatatgttgatcacaatttagtagaatcatggcagatactattaaatgtcccaaacttttactgtggtttaaaagttatagaaataaatttggaaaattggagttaagtaaaacaaccatggagttttaatatgtttaagagaataaatttaaaggtttatttatcatttttatgtgtatgtatgtgtgtgtatctgtctaagtttatgctcatcacattcatgcaggagaccctggaggccagtggagggcatcagatcccctggaactggagttgcaggttgctatgagccaccgtgtgggtgcttcgaactggacttgggtcatctgcaagagcagctggtgcctctaactgctgaaccatctctctagcacacgaggatgacttaaatagaggctgttaaaggaagatgagagaattggtaaatttcagaagaaaagtccaatttgcaagatgacagagatattgtctcggtgtcctttgaagctgtgaactgccagattccacacacacacacacgtggtggtctctcacaagtgggccacagatcagagaactggaaaggaattacatctgacctttaatggctcctttcaagcagttatggcctgccaattcactaataagtattatttaagagtccctaagtacacatttgtgcagtgttcctctacagacttaggaaaacccatttcaggtttttggatcaataattatcatttcattcaagtctgctgaaacatggaaaactgactctggacttttccagcattcttgtcctggcttacagtagggtttgctatgttccaatgagtccatctctagcatgcctggagacctggatcacacacacacacacacacacacacacacacacacacacacacacacacacactgtatcaaaatctgtattttgccaaaggtagggtacaggaaatgactgcagccttgtaaatttgaaggatcttcatgcaacaatgcttaattgactagtaaaatttatttatttactcaaggatggtgaagaaagtagtaacaaaactgttaggaagcatttagagaaacctggttggaaaagctctgtatatttctttccctgaccaaactgataggttacacacccactgcttacagctggttagcacatttgcatacttttatggaatagaatgatgggggggtgcttctaaaaatgctattgtgggagctacaagaaaatattcttcatatgcttgcatgaaaaaaagcagcttaaagaatatattgaaattaagatgatttgtgtgtgtgtgtgggggggggagcatgtaccatcaattagtatatcacatagcagataaatagataatagatagatatgacagatgacaggtaggttggtagtggtgacagatgactgatatttagatgatgataggatgatggataatagatgatagatagattgggatagatataaatgatttatagagatcacagataatgtcggtagtaaaatgatagatgatgattgatgaggatagatagatgataaaactgtagacagacagatgacagatgatagatatagctagacagcccaacaagatacctagaaagacgtagatatgaaaagtatgatatgccagaggaaaattttttgttctttgtgttttactgtattgtagagatttttccccctctatcgaaacatggtgcaattttactaagagaatacactattaaaataaaatgttgccaacaaaagagatgacaattaaaggagagaagcttccaacttagttcacgattactcattctgtatttgttacgggtgaggtgcaatacttaagaaggtgggttagaaagcatcacaatttaaaactcagaagttggggctgccgtgattgctcagcaggcaaaggcctgtgctgtacgagcctcacaacctgactctggacttcagaacacaccattgttttcatgtcctagatctaaaatctgttgagtcaatgagtatgcctacttaaacatctaaatatcaccatattttctccccaaaagattatggctatgcacctgccaatgtatgcagaagcccctcccccaaaatgcttgtgaacattgactatggtgtattctttctgttttgagtcttacagaggcatcatggcctctatgtcatggtccccctgcacgtgattttcatccccaccactgctggtgaggttgtcttgatcatagaactgacttcagaaacctgtgggaaggaatggcacaccctgttattggcaacacaatgtgtgtgggtattcgtatatacatgtgtgtggtaatatgttatttattatttattaaagcttgcctgaagattcagaaagcaaagccagccacaagctacagaggtcaggcagtggtgatacacacctttaatcctagcagccatactagctagccaggcagtgatggcgcatacctttcatcccaggactcaggattaagaggtagaccgatctctgttaattcaagggcacactaactacacgaaattgatccagtcctaaaagaaacatcttacacaaaggtcatctcagcacctgggatctcacgcctttaatcccagcactagggaggaggagtcaggagtgatatggctgggctgagaaaggaataaaaggaggaggagacaggaactgagaacttttgcctctgaggattcatggagacagggttgccatttcagcccggtagaggtaagatttactggcttggctgctttgcttctctgatcttcagcttagagcttgaacctccatatcagtctctgggtttttattaatttgtgcacaggtgctctgcagctctctcgccatctgaaggcataatgattgacacatatggtctccttttttgtttttctgcagttatgctttcattttactcttaggaatagctccctgtgtgcattttaaggaggaacttgtgtttagtctagcatttgtgttggggtcaagtaactatgtgtatactgcttgccttagaattctagtgtctggccatgtctgtctttgaccttaaacgtcacaagcattcactgggttgttcagagagagcagccagttcatgtcttaacagccccagaactcctgcactggcaagggacagcataagatggcagaaaatacttaaaaaatatttaccccccaaatatttaaaaatgtcctttgaacctgtgttctcatttggatgtcccaaaggcatcctcatttcaacatgtctgaaatagtttgtcttctcaccctgaccttgtcccagttggcgttaatttcacccagaggcccagtttagaaaaaaagtcttttttgtttgtttgttttttagatttccacctttctgtctctttatacagttcctatgtcactaaagcctgaaccttcattccccataatttgttcttgatttggctccacgttcttcaaaaagtttttaaagtatgttgtatgcttgtccacacacgtgggggggggtgcaatggtatagttgtagagggcagagaacaaccttcaggagttcccagagaggaagtcagatgatcagacgtggtggtgtgttcctgtgttaattacttttctactggtataatgtaacagtaataataataataataataataataataataataataataataataataataaataaatggccaaggcaacttatagaagaaagggttaaagtgggattacagctccagagagatgagtctgttaccaacacacctgggtaatgttgcagaaggcaagcatggcagctgaagcttacacatcttgatccataagcaagaagcagagagatcaaactgagaatagtgaatgacttttaaaacctcaaagctctttcccagggatacacttcatctaacaagtctatagcttctaaacctatccaaacattttgaccaactggagaccaagtattaaaatgcctgagactatgggggacatcgcattaaatcactgcatacttttacccactgaaccatctagctggcttggatccctattcttaatttaacttatctctagcttagttcagacacttagcggtggtgaccattttgaagcaacagatagagggacacttttatccactgctactatttccagcatttacagtgattggatggtatctgaaatgagctctgtcccttctgtccctcatttgactgttaagattgtattctaaagaaaaaatgtgatttttatgtgatggtcaagtcaacagagttggggatcagaatcaggcaatgaacactcgaatctcctgtctactacctaaaatgactattactttcctccttgctggttcatatatgtggcaatacatgcaatttcgtgtttgtaagggggtggggggcaggtgtttggctttggcttggctcacagatggggaaggtacagtggcaggagcagctctcagtcatggcagagggagtgtgaggctgcttgctcacagcttcgcagatcagaatatggaaaggaatgccaaccctgagccagatttcaaaccccaccctctttattcagcctggaataaactgtctcctgggttattatactgtagtcaggttgacaatggcgattaaccatcgacagtttactccttgtcaatttgacactccagacatcacttttaatgttgctaaactatattacaccacttgttatttagcatccagctacagtgctacctcatatgaagatagatggtgcatcccatctggtagcttacagtgtgtgtcaaatttaattgtcttttatgtatgtgatggtttgggcatggtttgtttccccgggtgtccaactgggcaatggttgttctacaggggtggcagtacagggacattgcagagcaggagatgtatctgttggaaggtccttgtgtaagctgggtcttcggatggtcttcggatggtcttcggatggtcttctgtatttctgttccgggagggttggtaggaaaatggtctggaccactcagtttcactctggcttcctctttggtcctgtagttacttacttcctgtacatgttcctgccatggtttgaagtcatctgtgctgagtcctttgccaccttttcctcctcccccacacagatgtgaacttgaacccctagacctgtgagccaaggaagccttttttgtggaattagtttttctcagatatttcttagtaatactgtactgaataatgctcttccatatttacccacagttatttaaagcaaggtctgtgatgtaagtttctttttctactgctgtgataaaataccctgacaaaagcagttcaaggtaggggggtgtattttagctcagggtgggtcttcccacttcattatacataatcatgttaatacccacacatccacctgatctggacagtctctcactgagactcctaccccaggaaatttaaaatcttgtcaagttgacaaatgaaactaaatcaatgtataacttatatgttgtacattctctcctttttattcagtttctggagtgactggtacattgtggtgatcaagaacttaaaataatgtcttgtcaacctcaaacaaaataagagatatttaataagatcacaaaggctttcaagtcaaaactgccttttctaaagacaaaaagagtaagttttgtttatgccacattttcttttgaaatgtcattctaacttagggttatcttcttttctataatcttgaagttatggtctcctcaccagctcttaggaattagttgcagtggccacatttaaaaaatagttgcagttgctacatagcattgattatgtaacttaattccagtcaaaagagggtttaacacaccaaaaatgtttatttaaaatgattttaaggaatggaaagatggctgccaccatgcttggagatagaagttggatccctgaaacccatattgtgtaaggagagaacctgtgacaccaataatatgaggcccggagacagagactggggttgaagctgagtatcagagaagcaaagcagccaggccactagctcttccctccagtctccgtgaatcctcagagggcaatgatcgtcaccaaaccccagactgcaatcctgggagctcctgcctcctcccgccttatagtcctctctccgccagccacatcactcctgtctccggctccctagtcctaggattaaaggaatgtgatcccaagtgctgagatcacctttgtgtgagctgtttctcttttagactggatcaattttgtgcagctcagtgtggcctcgaactaaccaagatccgtctgcctctgtttcccgagttctaggatgaaaggtgtgtgccaccactgcctggctctatggctgtggctagcttttgcattttgatctttattagatcataaacaatatatcaccacaagaaccaactcctgaaagctgtcttctgacctccacatatgctccatggtacatgtatggctgtgtgtacatgtatgtgagtgcatgcacatgtgtgtgagtgtgcgcgcgcattagatactagagaaatagtagataaataatgaactactccacaaatatgaaataatgttaacatgaaaaggaaggggtcttggttattttcctccttttttgtgaaaaagactgggcagaaacaatgtagggaaggaaaagttcatttaactctcagtttaagaggttcttttccaccatggagagaaggcatggcaagggcctcacaacggtggagcttgcctcgtggcttctcgctgttgttcgatcagggagcagagaactcatgtcagaactagatgtggatataagtgcagggctgaacagagacaggcggattccagtgagcttctacctctacacctcccaaacctctcaagacaccgtttcaggctgcagacaggtgttaacacacgtggtgggcacttcctattctggtgcagaaaagctaagcactttaattggtcagtatcagctggaatttgagagaaacatatctatctttgacagcttaaaaaaaaaaggcattagaagagtgactgtctttaacatcctcacttttgaaaacatatttttaaaaccagtatgaattctactgaagtgtgtttaagaactctcatttagagttaagtggaagaagaaaaaggccaaatcatctttgcacacgttgagaagaaattcatcgtgggcaatcaccatttaatatccagcactgactttctgagaaagtgctttctctaaatgataaatcaaatcaaatgtgttgggagtatcattaatctcagaatataaatgagacaagaaagaatattaggacaatggaaacattaacattaagtcagccattgtatcaaagaaaagaaaaaaattagaaaactattcttaaatgtttgaggttgatatcaacatcctctatcacagagactactgtgtagtgctagcttgtaggctcacctgtaagtatctacccatctagatgccacgtggtagacatgctgccaatactatattaatataactaacgttggaaatgaaaggagccagtgagatggctccacagacatcgctcccaagcctggcaacttgagtttgatccctatgactcatgtggtggaagaagaaaaaaatccctgaaagttgtcatctaacctctacatacatggtggcatgcactcatgtaggtatacacacacacacacacacacacacacacacacacacacacacacacacacacacacacgaatgaagtcatatatgaaataaatgaaaccaagggcatcaaaaccaagactttccttaaatgttatttatcccatgatgtatgcaaatgggactactttcgagattttgtacaagccatatgtttctgtttccttcctgctgtcactttaaatagttggaccaaaagcaacttggtgaagcaaagggtttatctggctcacacttgcaggtcacagtccatcactgagagaatcaggaccagactctggagcagaagccatggaagaatactagcctgtctcacacagactaatgcgtagttttcctatacagctgattagcacccgcctagagaatggtgccgcccactgtgggctgtgccctcttccattaaggacagtcccctacacatatgcccacaggccaccctgatctagggaatttctcaaggcttttgtctcctgtgactctaggtcttgtcaagttgacaattaaggcaaactgggacaccacatgcctattccccatctttatttccactgtttcttctaaatgcatggttatgtcttatatgccaaaggcttgactttaagacttggcaatcaattacacagtcaggtattttaaattcttgaaaatttgaagctttttttttttaacttactcatttatgtttacatgtaattctggggcttgaaccccaaagctcacacatggtaggtgaagctgtatactaataagctatatctccagctccatggctgtgatttattttgtttagtgactgattcatttatttcttttttcttttcagacagggtcaggttatgtagtccaggcttagtacgaagtgtgattttccttcttcatcctcctgattgctgggactccaggcattcatccctagacctggctcctaaagttttcaataaatattttgggtaagtgttttgtacagatttatttaacgtctcaatattcaacatggttttgcacaatgtcagtttatttgatctttatacaaacactttggaaagtagagcagaatgaggtgtgtgtgtgtgtgtgtgtgtgtgtgtgtgtgtgtgtgtgtgtgtgtgtgtgtgtgtgtgtgtaggactttccagatgcccaatgtcatgcctattttctgttgtcactgaattctaggggataggtagtttataatgaaaaaagcatttcttacagatctgaaagctatgaagcccatgctttatgtgtcaagggacttcttgctatttcagtacagtggaaggcatcacgggcatgggaaaggccggagccacagcatgtcacagaatatatatatatatatatatatatatatatatatatatatatatcactcatgattgcagacagtcctggacaccatcatttctccattcctgaggatggggccacacaagtcagtcatctcttgaaggtcccaccctcttcataccattacactggtaattagatttcagcaccaattttggagggggcaggaggggacaggggacagtcaccacagtaccatggctactcaaatgcctatgcctggtgggccagagccatgtagaatcttgcttttcctagtgtccttcgtggtggttttattatagtttcaacttgacacaactgtagacttacaggaaatggagtcttatgaatggtctggaccaggctgggctgtgggtgggcgtgtctgtcagggactttttaatggaggtgggaggccaacccagaatgtgtgtagcaccttgttgtgggctgggtcctggcctgggtaaatgtagagtaggctgagcacaagtgagcacgcgtgcgttcatttctctctgctcctgactgtggacgtcactatctgcagctcttgccttgactcccctcagtgatggaatcaaaagcccccttctctcctatactgctttttgtcagttttttttccctcttcctctattttctgagcaacaggaatgtaagcaggtgggcaatgctgctccttagaatctagttcttaccttccctgggcaggttgcataccgagggcccaaaattagagcaaagttgaaggatttctcttgaaatacacagatacggataggataggatttacgtgggtgcctcggttctggatgcatcctgcccagttttaaaaccctaacttctattagtcaatggttagactgcatgtttacacagttgaccaatattccataaatgtgacccacccctgctccccagccttaacgaactagtgaacttcttgagcaggcagccaatagcaaatttcagtccaacaagattctgtgaggtctgttgccaggtagaattagcagggctgctcctgaacaaataccacagttccactaattgctgttaagtgggaattgttcttctgggggactaattgagacagcagttcctggcagcacatgctatcactggtattttaaaatatattgcagtcattatcggatggacatcgagatgctctctcattttccagtttcttgactctcttggactctgtggcacacaaatgtggccgtgcaccctctatgccgattctctcctttcagatagaagcctttttgtactcggctttggttttattgctgtttctattattatagaggtttttctggcaaccagctgcttcttttcagcatttatgaggatttggccattttttattattttatttcagtggtggggagtccagagtttagctctggcaaggggtccatcagcctgtgttttgtgagtggattatgcatgaggctggcccacaccttggctctgatttcagctttagggggcctcctcttacctcggagcccatggaaagttgttctctgtacctcccagagtgggagagactaaggctttaggctaaattgccaaatcctgtatttgtgcaccagcaggcaataagtgaagaagcttaagtatcgcgttcctactgtctgaagcctgcagaccctgcaatcaaacacggagaccatattccaaaacaattgtgtcccatgatggtttattatgggcagagtcggtctctcaaaggatgcttgccaataaaacaaagtgaaaaactggatcccttcatgatttctactccacaaaccacaattttgtagatgatagctgagcccttattcagatttcaaaaaccactttgtgtctttaaagtccattcgttcacacagggcccaggatagaggatgcctctgcaggcagcaagcagcatcaagcagagactggctgtctccgctgagcccattcaggctgcctgtgaccttcttgcccagccatgctgacagcctgcgaagattgagttaaccatgaggtccacccagcagccagggctaatgggctccttcctcctgccgtgttgaagttgggatttatcttcctgtaggatgattttatagacacctcagagtcaagcctttattgccgcatcagaatacggccaacagcaggttggacactggtaaactgcagatgccagccaacttgactaagaggcagcgtgcgggggagcacgtgtcttttatactctcttgtcacctctggcggatgttttgtttacagatctcggtgaactttccttttagttaagaaatgtgagaaataaaattaggcaaacaaccctgctcacactgggcgtggaaacaatgcttttgttggcattctctaaagtgagaggcagttttagacatccctctctgtgtagagtttgcatccatggaatgtccctcccatccccactcacccatttacccagagttaaatttcaattgtgaactagctcttaggtagctctataactaaaagtgaacatatgaactttggggctgaggacctggtatctgcattagaagataaaaaagatctatctatctatctatctatctatctatctatctatctatctatctatccatctatcatctatgaatctatgtatgtagctatcatttatctctctatgtatccatgtatctatcgtctatcacagagatgtaattaagaatcttcctgtcaaagaaaaggaagatgttattttcactgttagtaactgcttagaaagtaattacaaaagactagatacaaataaataataccagagctaaggagtggctcactccgttaaagccctggtatataagcatgaatttaaattccatacaaaaagctgctcatggcagcgctgggggttgggcatccttggaccatgagccagtcagtctatgcaactgaggaactccaggctcggcgtgagactcactctcaagaagttaagcctgtaccagtgagggaagatgcctgacataggccatcggtctccaagtgcatgtgctcactgggtacacaggaacacgtgcaagagaaaaaggaatcattgaaaggcgaggttggtagaaagagctcctattttattagattccaaatagacacagactacgacagaatcttcttacaagctagatgaaaggaagaatgtaggcagacaaggacatgccaagagaagaacacaaatcgggagttattgagagaagtaaagattctgggcaccttgatattattcttttacagtgacatagagccttataaagactcatacattttcccaactctttttttttttttttttgcaagtccaatgtgagcagagcgtgtgttcacagcatgagtccttgcagtacatctgtttagataagattggtttctgtgcccattggccaatgctggggccagtctgctatggactggtttgaatatcattgctgaatttatgtttctaaaaaagatcctaagtctcttatgggcagtgagtactgtaggaaactcatacagtcctcacagtagccatatggcgtatgctccataaatacctagcaagtggcatttaattagaggacagggagagggcacatcctgcattgacagaatacgactgtcattgatctcattttgctctgcaatgagccgtttacctagcctaacgacctgcaagatgctttattttcacagatgcaaaagtcatattaaagaatggatccagagccagttataggggcacactcttgaaattccagcactaggaagtctgaggactgaggcagggtaatctctcgttccagggtggcctgcactgcatagtcaaaacttcatctcaataaactcactcccgccatggatccaagaagggtcacagtctaaccttgtattaaccatatccagtatgggtacacaccaataaatatttcctggtcctatctattgcaactttgacttggacatggacaaaggtggctggactctaggtaagttaggctacttctgctcagagccagagagctgctgcatctgaccacttcactacaggcttggctaactcaggctgacttcctgctgtgccttcttttgattgttttaatgttatccatccaatagatgatgttttgatttcctcaccacaaacaccagcttcttctgctgtatttgtatttgtttaagcaaaatagttttcatgctcttgacaaagagtaattggaaattaatctatcctttcctagtgttcatgtctttatatttttcatggggttgttgagcccctctctgtagccattttcagaaaactgcgttactcactgctcatgtgttccttagtcagtacccatagcctttcgttgtctgtcctaattttctctgaactcataccagttcttcagactgtgtatagcacaatggctgtggtcccagaccccagctctttaaaagaagagccacccttcttcattgttctgggaaatcttcttgggctcctggccaagaccacactgcccagttagtattattctatttctgtgaacgtgagtccagcatgtcctgaggtgtgtatgttaggggctaccatcagatgcccactattgaaccctatcggttctgaattgatttgaactgcaagtgagttggcctggaattctggcatactataatgtattttgaatgtaatggtagacacaagttacagggcaaaatagtatcaaaaggaattaaacatttaaaaacctttgatactatacactatatataggcagattataatattagttcacataacaagcttttctttagtattcatttgaattgctgataagtggcctgtaaacaatataacattatatatccttaagtattacacaagttggactttctgatcatttaggaatgagactttttctaattccattgcactaaggaagtgctatctagtctttacaaacagggactagggagaggggataacacttgcccgtggagttcattggaaaatgatgcatgcaatcccagcacagaggcagttctaacggtgtcaattctttcttgtctagcttcttcatttgtaaatcttgagagggagaccagaagtcacatgagtttcctgaactggtgtggagaagaccagatctgaatgaactcaggccatccaacccctggccacagcccctctgtaacttgctgacctactctgtgctgtctggcctctgtgctttggttgctttctccttatggaaggagcaccaggcctcctatttgataggttggaagcaatgaagaggggatgtgaggagatcgatcccaagtccgtaaggctaagatttctttattcagagaaacaccagccaagcgcaagccagagcgtgcccagcgctctcaggctagcgtggccagagagaagggctatccacgtgtccactgtcccttaagaatccttcccgcgtcacctttagacctcccctgaccacgccctcacggacgtgtcctggcacatctgtccgggctactaggaggcggggctacagtgtctccctacagggatgtatgaacatcaacaatgaagctgttaagcagggactctgacatatgacagtaccctcctcctcccacaaacaacagtgggtttacttgcttgacttcgataattcagaagtcacaggaagattgaagggcatgggttcaaatggccttttatagctttgctattctccattttattctgtaaaatggttcagtgaaaaatgccacatatcatacacccatgaatatagttaaaaagtacagcagcgctctgattacttcccaacttaagagtcttcccttaaaataatgggccttctgtagatgggaatggcagggttaatttagataagagtcgggctcgtttaaaaaaaaaataaaaaggaaatatgaggccgagtcctttaacatgctcttttgccacaagatagaactttattaaagcagtagaaggtataaccatgcctttaaaactgtacattcttagctgactgcacaatcacagggaatccaataggtcaagtagagtggtacttttcagtgttttataatgcatttaaatattatccaacatccagcagagaattagtattatatgaatgtaacaggaagcctcttaatttagcctgtgcaaaaaagggacatttattataagataaaagggagccttatgggaccaagagtaagtcctcgggaaagaattataaccatggtagaatgctcaggagtcccatattagccagacaggctattttaccttctttctgttcacataaaaactaaaaatgggacaattgactgttattatgacttcaaatttgttttatccgaatcattgatggatatttaataaatactggtctgggtacttcagcttttatgcaccccacccccgttaagtatctaatgatctgtaaataagcagttgagagaggactatctaaaggaatccctcctgtgctccttcacaagaccacagatctcgggcgattcgagggattcaccctcccgtttatgtgtttcacgaggagcttagacctacacgctaagtgtcctgtccaattcgtagagtgggtcccaaggaagagaggccacattgctctgaaggtctctggggccacaggaagtcgctctcctctgtcctccccagtccccactcatgcctttgatacacctatctactctttccttctccacaatggctcttccattcacggcagcagtcacaagaagactggatgaaccctcttggcctcacttcttcagtagacagttgagggctggtaaagctgagatagtttctcaggaaaagcgtgggtcaggtgatccagcaggttccactagaaaagccaatgtgtggacatgggtagaagtttgctgacaccacacccagttccttcaggaaagcctcagctggatcctgactctaaggtgtctctttagaagagagtttgaaaacatcaatttttaaaaagtgccctcttggtgattcttacgtcccagtctggcaggcactgttttagaatataccctcaaaaacaccgtataaaaggcagaatttcaggctgaggaaatgatagacagttttctgagtcctgagacagatgtgttccctaccaggtctggtgcaggctctgtatttcacactcctaggcctttgggagtagcagcagaggtcaagcaagccacagtgagtcagaggccatggcaggcatgctggtgtccccaagagctacagccagccagtaagaagtttttctttggctgttagtgactgagttgtttttactgtttacatatttccaattcaatgcattttttagagatttgtttttatctataggtaggcatgtgtctgtgtatatgtatgtgaccctgtatttggatgccatcaaaggccacagatgtcaagtgccctggagctggagctacaggcctttgtgagccatctgacagggttgctgggaaccaaacctgggtcccctgcaagaacagtaagctctcctaaatactgacctacctctccagctctgaatgtaggtttgcaaacctaacctcacctagagtcataaacactaattactaaaggcattactcctgctgccatggaattagaaaatgtatttcatgtgactgttggctggagagtggaaaatgggttagcccttctggctaacctttccctcaactttttagacaagcgagcacaagcaggaagaactcaccacctcttgagcagagcaaaaggtaccttggttgcaaggacctactgtgtgccagaagtgcagcttcacttagtccttacgaccttacaaggtagtcactgctatgcccgaattcagcaaaggacctgaaaacagcaagattcgaccccactggcagtatcagggatgggcactgtgaccagcagggagtaactgactgtactgcctgtgccctctgcatcagtcagcacgtagagcagcagccccaagtaaacctgtgccattctttaaggggctgctctggtcccgtctcaccatgcagtctgccctgacactcctcccttctaaaaatattgtttcagggttcaaaacttacaatactttgaccactttgtagctggaaagcatgttgccatgagtagaggagggtgactttcctgattctttctctctgtctctctgtaaaattaagtaaggtatatctcaacactgaaggggttgtctgatattcaatgaaatacagagcatacgactttgatgtttaagtttggacatgtgccaagctaaggacacatggtagagacatttcatgtccatcaagtactcatttgctttcctactgtgtggtgattctctgtgagtcagtgggcccaagtggccaatggaacaaacagaagtggcatgtgcccctcctcagctgaggaaggttaaggctggcgaatctccttcctttctctgccacacccttgctgggagccagtagctttctatataaactcaactgctgagtgggcatgaggctcctctggctgtgcccttcctaagcaagaggtcaatacacagcaaattcagtacaagtggccctgggatgctgtttttcctcgtcagcacactcaacctcacagccctttacgctgactggccagggaagggctggttacaaatatgtgatgccactggggagtgattaaaaacaactggttatttttcaagatggtacttcgctcaagtcttctggcttcccaaggagcccttaggagagacgggtcctcagagcaagatggagctccaagaattctcattcttctgataatgtaatctcagtgcactccggtgttgtcaagacctcctatctgtgaaaatgcttatggcacctccccgggtggaagaacaaatgaagaaaaagactatttgtttgatatagtcaggttctctggaatttaatcctatatcctcttcatggctgagctagccattcaaaattaaaatgaacctttcatccatgtgtatcataaatgggcatttatcaggattatatgatttttgcaacccatctgaatacgtaaccagaatttgttttccttccgtttcactatgtaattaccatgcaacaataacaaaagtgacatgtttgaagaacagataaaatgctgtaaattggtcagtaatggtgatatttcctcatcttctggaaaatccatttattctctctcaacaaatcaaggcattgtcagcccatactcatcttctggccagaggggctccaccaatttctggatgtgagcaagtcctggaatgcagatgaggccaactaacgaaggctttcagaacaggctgctggtctttgcgtgcctcaatttctaaatcatccgtaatggggccaagacctcccaagcactaaaaagagcgagctgacatgctggacaaactgttaattttttcctgaagaagctgctatattgcacatctgtcactgtggcgcagacaattactcactgagtcggggagggaaaatctgccgcttgtttcttagctgagttgttaaggggcctcatggagaaacacaatggcccgagagtcggaacacactggcttccagtgtgcttggcaattgtctctcagtctggggactgtcctgtgatattatatcaggtggaagaggccaggatgtgttttcaaagtaggaaaggcattagatataattggtatagaaagacgtgagtccagaatcaaggctctgggactacaaactgatgtatctgagagttaggagtgctgtggctttgcattttacacttcccacctttaaggtgtgctcccgagtgcttcacacacacccaagagcttcttgtagggacagcacacctctattggttctgcaatgaaccacggccaccaatgcagaatgccagaggaccaatttgccacttagtggaaacctgctctattcgctttccactttcttctaggttcctttgtccatcccaactgtgcagctctgctataggaacaagttcacttccattagagatttcagaactgtccagttctgaaaagtgtaccgtcacttagtttttttttccctatatttcctaaagaatgatgcttaaagaagaaatatttcttagatttgttttttaattattattattattattttgagacagtattttctatagccgggagctggcttcaaacttactctgtggctgaggctggccttgaacttctgattgtcctggttgccatgacttcccatgtgccacactcggccatcagaaatttagaagtaacatgtgcaaacagactgaggataacttggaggtttctatttgggatcatgtttacataacctttgggctgcaaagtcaagtatcatgcgcaccactaaagtgtgcgttttatttatttatttccgttttttcgagacagggtttctctgtttctttggaggctgtcctggaactagctcttgtagaccaggctggtcttgaactcacagagatcttcctgcctctgcctcccgagtgctgggattaaaggcgtgcaccaccaaagcccagttaagtgtgtgatttatttggaaaggtcacaccacagtgggggagccagagactcacaaagataccattcagttgttgcctgatctgtcctcaaaaccgaaggcatcaacagctgggactgtggtgatgcagcagtgaggactgcaaacctgagggtgacttaaaccatatgtcaactcaaattcaggtgacaaagctgatgtacaaataagactcactgtgacaagaataggtcataactctggcagggagactcgccagacacaagtcccaagtgtcagggtgcaaagtaaggagcccttcctagctgtggatggactcagcaggggccttcattgtccacttcttgctgactttgtattactgtaagcctgttacatagatgagtgcttagtacctgttgaactgaaaaccaaccaaccaaacaacaaacaaacaaacgcttactgtaacaaccctactcacttttatggaagaaagattctattcccacaaaaagcgaagtgctttttctagcaaaagaactcaacagtttgatgggtattacaaaatatttcaagtgtctcaggaggtcatgagagaaagtgagccaagctgccctggccacaagatcccagctggaaagagaactgaaggttggttcatcccagtttcagaggaaacagaaacacggacatgtgcaaggacagctcaagtcagttatgaataaatttgtgagtcagatacgttgccaattttttctttaaaacatttttgagacactgaaaattcccagagcttaaaagcaatgaacatgttaactattacagttaaccgttacatgttaactgtatgtttctacagtgggtcaaatgcagaacctccagcagactatgtaagtactccagcattgaacatgatacctccaatgtatcttaatggtatttccatccctcgtttgcatgactttgaggtatggagagaaggtcctgagatgtgtcctagtgagaatgcactcgtctggtgtgcaaaaggcctgaggttcaatactgacgaccgtggaaaaacaaacaaaaggaaattaaaagaaacaggatgtgaagaagaaaatatacagacaacagcatgagaaataatgtcctcaacactgtgctttattattttggttctttgttgaactaataaatagttttctacaaaaaaacccaaagtattaattacttgctaacaacttcattttacagtaccaatgtagatcatctctctttctgaaagacaaaatacaagttaaaatggttttaaaagtatttcaacaattcctctcttatgagacatctgctcaaaatgaataccaatttgaaatgttaaacatgaagggcagaaagtgtcaatcgcctgtacacagcacacagatgtgtgctgcaatcacacctgtgtgtacacatgcctattgaaccctgccgtcttaacttctgtctgcttgatcactatagccaggattcccaaaccactgtgttcaaacatggagcccaatttatgggcaagctgcacttagcaatggatttccactgatacttacttttgagacagggtctcactatgtagtcctgtctgttctggaactcactatggtggactaggttggtcttgaatgcctggcaatcctcttcctgccttaaatctcccaatgcctggggatacaggtgggtgttaccatcactggccactagtaaagtcactacttcatttaaaaacaaaagggtgtgatttgaggggaatatagccttatatatttccttaggaaagggaaagggaggcaatgaccgtggtccacatcccactgacctcaagttcacacaatgcagagtcacactcaagtggccatgctccgagtcttctttggctactgtagtgagtggatggatacgggagagaccttaactggtcaatttgcagagcagcatggtggcttcatgaggaagcagaggaaatctcagtactacttaaaggagatataaatgatacatctgaaatcacaagcccctttgatgatattggctttatgagcccatctgaatttactaattgctattaaatacaaaccaatgggattctcgtcctgagcagacatctgatttacattaaagtctcttgtttcaatggtgttgacttctcagctatggttatgcataacagagcatcacatcgtgttggtatttgtgaggacttagatgctgaaggggtacctgtgggcatttggggtggtgtgggggcagtcccctctaaagtaagtactgatcatttactccaagcaaataaacaccagtagaatgtaaactgttctcagtcacctgtgagtcaacaagttcctagtgtgaaaagtagaactttggtgtcacagcagctcagtgagcagcttcctgagctgcagcagcagactgcctggaggtcaacacggagcgcactcagacagacatggaggccctgccggctgcatgtgggctgcccatggatcttggacagcaaggaaagtggaaacagtagccacttcctccggagcttcgaaccatgtgtgcaatggcctcactgtttctcactggctccaaactgagccttcaaaagtcccagggcttttaaagaccttcaagaagtgaaattcaaacaaagcaaagccaacagctttggaatagacccttgagtatagtatactgttataatctcttcaacttgtctcctacatgaatacaatttgcattcaggaagacaacggtttaaaaacggtggatttctcatgacgaaactgcacaagtagcagtgctttacccaacacaagtgctccaccagagctcacacagctgtctaccgacttgttctagccagcccactcttcaccacagtactgccagcaaaggcagttcctagaagaaatgcagatgtttacccaactatggaggctgcattttcattaggggaacacggaggaaaggcctgttacccgtcaaaatcttttctactgccttaaaaaacatttaaaaaaacttttttcaattcacaaaattgaagtctgtactgcttttgttcaaggatagacttatgtgggttatctcagcctttactgaaccaattgagagcattgtaagtaataataattagtagtgtttttaatgaagagcataacaagtcagtgtttcctgaacaaagaacaacttagagttcctgacattatgaagtgaatgactcagaaacacctcagaaatggaatgggatgaacatactgctttgctttattgtacaggaagtgttttaatctgacaatgacaggtcctctaggtttctcctgttccccagggagcaggttaggtcattgccagacatcttggttattgaggaagctactaaaatcttcaaataaactgactcaagagtctaataatttacttcagtgactaaaaccttaaatcatctttcttcatcttggagctgattcttaaaaaatactagcctttgggaagaggtagacatctggagggcagggtatacagttcagtcagcacgaatttaaaaaatacagttttctttcagtaatcatcttaggttctaaatgaggtaaagtttataaactacactggagtaatgctgagggcactctggtgatgacaatgagcgtaactgtgatcaaatgtccgagggaaatactgcttactgttggctactgaattcacactaaactactgaaagaattaattattgggcactattactgcgaatccttatgagaggcaaagtcaaggaattcgagcttactaagcctttcccagatgtgcgtaggactgcctggacggtgaggggaggatgtgggagggaggcagacagaactacctagtgtaggcatcaggacaaactccatcctttcgggcttggtttgtctgggtatcacacacatgcactgatcgagcaaggcagcagaaagaacccacgtctaggatcaaaataaataagagaccaactgttcttcaggcctaggaactgctggaaattctgaggaaacataaaggctcgtcgagggttgttcttcagcaccatgagttgtgatggaatcccatttctatcactgtggtggggcactatgcagcctggaagctaactggaggcaacagagagctcagcttccaaacagaaagctctgtgatcgttttagaacaacggggcatgggaacagaaactgcatgttctcttccttgtttttctgctcaggaaggctttcctgacgtgggggcagagctggtgggggtgctttttggtagaggaaatccaagtcctaaccccttcggcctctgcacggcttggacaggctcagcgatccctctgccgtctcgcccaaggcccgacccaggtgtccagcccatactctgaagcatgcggttcccgatgttgctctctaggatcggctgggcattttcacccacaattcctgaaatgagaacatgacagccgcaggtgaagatctaccctgggctgagaaactccagccctagggcctctgtgtcctcacccaccacacaggcatccccccgtgtctgctgcctttctcacacagggccacacagccagatgggctctacaactggggggtttttcacggctacctattctgcagtatcttccatttgccctgtaccctgaatataatataatcaaaccataactggttgcaccctgcatttctaagaatttaattatgcgtgtgtgacttatacatgtatagggaaatgctagtgtcagaggccagaggctgacatccatggtcttcacttgcctttctgagacagtgtctttcactgcctgcagcttggtgattgtgtagacccaaagccagggagctcgtgcaggactctgcctgtctccagcactggggttacctgcccatgttgcagcacacagctttaacatgggccccatgcttatgtcctcaagccgggagtttcgtctgattacccccttctccttcgttaccatccaggctaccacagcccttaactctatgcccaaccttcttcttacaggtccatgttttaatggctagagaaacaggaaaagaaccctgaagatctgttcatgatggccctccctgagactggagggacgatctctctcttcacagaccctcaggatgtctgtggtggcccagctcagtccccgagtctggggtgtccctgttataaacagagggtgaaatggacggctggccctcttcaatggctctcgagagaacagcacagctaaccgtccgcccacacaccagtcttccaccacccctgatgtgtttcctccctgactgaaggtgatgacagcaatgtctcaggcttacatccttcgacctccataatttaggaccctgtcctcaaaggcaaacaaggcacagggggtcctcaagcatcaacactgacagtaacagatacccaggggctccagacagcagcactggcctggttctgctgtggatggttacacggaagaaactggttactgcgctttaaactgtgggcatgcattttcatgtgttctttgtaattcagggtgggcaacaagtatcagtgtagagccaaggagctcccttatctggtattcagaggaacaggatgtgggttgatctcccagccttgaagaaccaggctgtgctgcagatgcgccttagaaactgaccctctgctatttactgcagagcaaacaccagctgagcagtaagctgtttatccacactttctataccctccatcttcagtgctgtagggcaagagtaacagcctacgccatttgagaaattccttacattcaatagggcctagtttattataataatcagtgattgtatgaatcattagctaactgaaacaggccaaagggccagagacctcagtggtagaatgcttggcaaatgtgagcagggccctgggttcaatgctcacgtctgtaggaaacacgcaccttagcatgtgacaggaaaggctgctgtgacccgcagactgaaggggagcagctggggtctaagccagctccctggctaacttgtctcctgcctcaatcagtacacaaagactagcatgcctgagactgtgagaaagaaagggtgggcaaaatggaaaggagacccttgagcttaaaaaaaatatataaagaaaaacatatagcaaaaaaaaaaaaaaaaaaaaaaaaaaaaaaaaacaaccagcaatggggtggtcacccgagcctacggagctccagagcaagtgccaggtgaacactgtgctcataggtgaacaccatgcaagtaagtacacctgcttagccccagcttttcagtgagtgcaacaagttaatttaattctgtgcataagctcaactcaggttggaggtctgacactgcccttggcaacacatctggtcacacagattttttggaacagaagactgcagaaattcagctttaattgaaaaaggaaaaaaagaaaaaaaaatgaggtccatttaaagcatgtctggaaattgcttcatgatggtcagaccgagtcctaagtgaagcagtgaaaacggcacacgacggtgatgctggcgcagagctgtggaggcctgcggtggttgctccacttctaaagttacatgtttatacaatgtcaaagaactccttctttctcactctttagggtgctgtttaattttttctacctcataaaaacagagtcaaataagcgatgtcttgtatttggaaggaaaaataaaggacactgatctccaaatgtgctgcattcccacataggaccagcggggaaagacaaaagtgcaagacctcactgctctctcactcttgtcccgtgagaggaaaacctggaagtcagcacttagacttagtacagcccaccccacagccatgacttccttttctctggatcccagcactgctatatcttttaggtccttttctagacctatgtggggctgtggctaacttattcctgccccaggttcctagcctgtctgctgggttccccaagtctactgaagcagagtgtgttctctccgctcagaccttgcagagagcagagcctggtggagggcaattcacttgtgtaattggctcaagagatgaaaatcttgcaccagcctctcttatccactaatctatccagctgactgcaagcctaattggcagcttgttgagtaatttggctcctaaagtgttgtattgatgttggatcaacatccagtgggaagggaggtgacaggctgcttcccatatgacagcaagcatgggcctgtcctgtccctgtcctgaattcagaaggcggttacaagttctccctcctttccagtccttttcctggccaggagagggtcagggctattactagctatgtcatcaaaactgtgagctgtaattatgttcttctcagtatctactttagggacaagaagtgagaatatgctagttgttactactgttagtcaaatgcttcagtcctttgacctgtaacactacacatacattatatgtaaataaaagtataaacatcaatctaattgcatgcttaactatatatatatatatatatgtatatatatattagttatatataaatacaaatatatttatatttatattcaagagtgccagttaactccagtgcttcacgggacagagactggagggtcagtcactagggcttgcctagcacgagcctcactacaggttcatgggaatagatagagcgacagagtgggacacggaatgcctcctggtctatgtgcagaggcaccatatgcagattaactctctctatatagttaatatatatatatatatatatatatatattaattgctttttgttttattttattctgaggtgctagggatggaatccagggcttggtagtgtttgtacacactcacccactgagtgtgttatccagtcttgcacttatgttttaaacaatgaaaataatttaaatttaagtgaaaatataatgtaaaaccagtttcttttcttaaatgatgaaaccctaaatgaaagacatatagtcttttactgtgtttggaggagtgctctttgtaatagaggtttaggttatagcaaaccaaacagaccaggcagcaataactgcaaacagcactacacttagagcgaacgatacctaagtgtagttggaaccatatctcaacaaaagtatttaatacttttgcatcaaagccttaataagctaggacttctaccaagagcgaagaccaagccgccactgctggccgcctgtaagaagggctacaatattcctcctctgctcactgctttccctccctcacctttacagacgacattttgcagactataaagtgcactctgctggcaagcctcttgcttcagtactcctcaatttcacaatagtaagtctgcatcctctgctggagacacactggctttggtatgtgactttgaaggaggcagagtacaagccatacattaaaaaagtcaatatctaaccatatcaatattcattttacactgtcaatactgaatacaaaggtgaaagagcagtaaataagcgaaagcactgaaataaatttggtgttcctgtcacaattaataaatgtgcaaccaataccacagctggttggtgcagccttctaaagagactgaactctgctcggcacaattgctgagaggacggggattttctctacttcagcctcatcactatcagatctggttcagagtgtcttacagacattaccatttatcatgaatatattatacaactgttcatgctgagagtcatcaacttacacatatccagtgtgggactgcaaatgaaaaagttcctaattattcatttccagcaagcttttgctaagtcctttctagatctgcgatttgttttcataataaattacagagaaatcagagagaattgcaagcaatatccacctgtccatctcttgattcttgctgtttcatatgaggagttttcttttgaattttcttcatttaccgtcaacgctgactaaaagtaacacgagagtgaatgtcagggaagtgtctgagggaaggcctgcaacgacctgtgatgacagcaggaacgcacgtgtgtgtgtgtgtgtgtgtgtgtgtgtgtgtgtgtgtgtgtgtgtgtgcatctgcacataggccaggaggcattccgtgtcactctttaccttattcccatgaacctcgtgctaggcaagccctagtgactgaccctccggtctctgtcccctgcagccctggcactgctggatggttctagctttttgggtggctgctgggtgtctgagctcaggccctggtataggcacagcaagtgctcttacctacggagccatttctccagcctcaagaatactttctcaagaggaactttacaggccagtagagtctggggaatttatggatgctacagagtctgaattctttgacaaaatctattccagaacttgcaaacaccaatattcacggatgaggcactatccaatggctaacttccttgtccgggtatttctgcaattgtttttctgactgcatcgggataagcgccttcactcaggtctgggccattagtgttagaaggtcttctcttaagtctaaggacttgcctcaaacacccacatttcttcctctctgaaaggagctgctgtacacaggtttgaaaaatacacttaaaatgagtgacacacatttttaacaaccaaccaatcaaaaaccaaaacagtaacaatgataaaaactcaccacattaaatgcctatgaacttttttccataagcgaaaatctagtagtaaatgaaaacctcaaatcttcaaagatctcaacagatttgaaatatggtatctgggatagactggcacaggcttagcacaggcttatggacaaagggctgttttaggctacagttaaggtttgcatctaaattcttcataaatggtttccttgatgccctgatctctaaggattcaaagtctcctgcacaaagaaccatgtgaccgcttcttcaagcacctgctgtccctacttcacatacgtgctaagtgtcagtgctctgttactgtggccacatggtaccatcagtaatattcccaggacatgtccttctgtggcttttgccactgaggccagaattcactgggaacagggatggtgaggaatcctgtctcagccttcagagactggaagagcttatcacatctatttgacctgacatgtggcttaatttccttatggacatatattatatattacaagtatttcatgaatattctacatttctctgcagtagtagctgatgcatcttctacaaatttcagacacataactgggttcaagtcagtagagagggctcttttttcattcattaatattgtaggttaattgtacaagttttgctaggatatctttatttttgcatatgatgtattttggtgggatctgctctcctaatgctccttcctcctcatcatcccctggttctttcttcttctgggacacaatacttttgataactagatggcatttgtgacacatggtctatttggctttgtctctgatctttgccagggataccccagacatcatctcttaatgtacaaaagggacacacgttttttacaacatcccacaagttcacttacattgtatgctgtgttctaactagagcatggctgctgagctcacatgtacaccactcaactgtaccaacaccatgtaccacattcacgcctcgcttctgtctacaagggcaggaaggttatttcagaaaggaagagatgggtagcaagtaaaagggaggaacaagagcaaaaggaggtcttcatatatcctcagaatatgtacactctggatgctcagggcattgccatggaaaagcagaccttagcagttggtcagtgactatcctatacagaccactcaggtcgagtaatcaaatggttttaggtagtgaggtattcgccatttcatctgcttattccctgttttccctgcaagtctgaaaatttcttcaggccagccaaagacacagcattggaggtttctgtatctttgctgtgtcccacccattttgatgtgtgcacagcagtgtctcattgattagctacttacaaggtccacacaaagaagggactatatacattctaacgtaaaggcaaatgatctatctgcattactgcttcttgcaaccaggcctctcttgcagggagagagattaccaatcgcttttattcctggtgatttatgtggcctgcatttgtgctccactccacccattttgttttacctgctgctgtgggtccaggcaaaggcgcagctttccttctccttttgatgtctcctgtgcacaaggatcctaaatgcatgcttgtttgcctacaagtaattatcagaagaaataaaaactattaacaaaggagggggaaaatgacactcaaacacacagcttgtaaaatctgagcctaaatcaaaacattctcaccaaagatggagctgcacagtaaaaccaccaatcttgtttatatcgaaacataattacgtttgttgacaagcgttcagcagctaaatgcaccatcataaattgttactgggatgaataatataaaaggaatgctttttaattttcaaaactggcaatctttctggctcaacataaaatcaagcactgttgcttctgacaggaaaatagcgaagattaattatctaaagagatcacagtattgttgctaggttatcaattggttgctaatgctttactgtcaggacaacatttattacaggaaaagtatgatcaatttcttttcggatattatgcagcagtgaattcttttaaaacattttaaatagatggaaggaaatggtgatgctgtccttataattcatacaattagaaatgtttaattatttactagtcaggagacaacaatttgaatgcatgaatgcctgtctgctgctcccaacagtctaacttgatctcaggctacgtgtaaagacaagacatacaagaactcagggtgagccttgttagttttggaaccagttacaattatccaactctgtttaactttagtcttctagaataaaaaagtttttaaaaaataatggctcaattagaagccaaaagggctaatgcaaagaaagaaaggatttaaaagtcttcagactttgtaagccaaagacggtttctgcactcatttccaggaccacaacccttgatgtgaggttaggatagggactgaagaccacagagcagaaagaaatgaaatgtatttattaaatcacatactcgtttacaaagaggcttctagtagtttcatgaggtatgaaacaatccaaattgaaaacaaccagacatatcagaaatgaaaagggaacaaaagtgatataattaaaacagtggtacatacttatactatatacacatatatttaggtttaaatataatggaataccattgctgagcaaactgtgtacatctgaacaaactgtttcaaacataggtacagccatgaggagggaggtaagtcatacagttggcagaaatagacaaatagcatgaaatctgctacatcgctgagcaagaaaaaggcatctactggttttccttttgtactgactgcacagtgtttctttgttatagaataaatctctatttaaaaaaactagttcagtcagttaatttttgctttgctctcaagtggttattgtcatacaaaactgtaatgtatttattagattgaagagggaaatcttgccttatgatttcaagaaaataaatggttatgataacacttatttttaaaatcagataaaattttaatcattgtaaggaaaccacagagaaccattatttttgtacaaaattagttcagcaaacatttagcagtgcgcactatgcacctagcacatgctttcacacaggtggtgaaaatgcagagagcagggaagaagaaatgaggacaggacgggaaggggcatttagttcttactacaaagtaatgacgagtggtcacgaaggcggcagggacagctctatcaaatactagaggggactgcatcatctagtctgcgctaaccatgctaagcatttgaatgaaacacacacaaacccttcatggggttttctttaatggaaaagctatacttgtggagtctactctttgaattctaattctaccaggataatgctacaactctcaaatgtacagagagaagcaacaagaaacagttcctgtctacagaaaggtgaagtaacggtcttgaagtccaagtggctgactgtgggaaagcccgtttcaagtgcacttgcaaatcagaggtcttccttatccctcatgcaaccgtgcttctctggcttttcctctgaaagtgcagtaatggccactttatccctgttagtgaagtcaataaactccaaaacttccattttatattctcataacaatcatgaatttaatttttggcatgtgtgtccatgggtacacatgcatgaatgtgcacacgtgtattggccagaagtctacctcagaggaagttcctcaggagagtgaccaccttctcatttgttgctggcctggactcactgactgagctagactggctggccagggcccgggggagcggcctgtcgcagcttctgtagcactaggatctcaggcacaagccaccatgtcctgctgttacgcctgggtgatgaagctcaggcccttccttacacccacacactaaaatcattttatcaactgagctctttcctaggcccgctttcacatactttcgtccactttaaaagctctctttcccaaagcctaggatcagggttaccttctccatggtgtacaccagacaactcagctatggcacaggaatgccagggtgtttacttgtgagtactgggaatctgccttcctcttctgtctgggcacagcggtcacagacctgggatatcgtgcccgacttcttatgtgggtgtctggaatattagctcatttcctcagccatgtacagcaaacactctacccatctaccctaacttatacccaacacggttcttgcaataggtggtcatagccctagcatttaaatgcatgaaaagtactcccacgtccattttgtctttaaaacttcatttctcaaattcaaaatttattagcaaggattgtgggagacagacttcaagaacaccaccctcttctaaaacgcttgtgaatctttacagagcaaacaggaccatcttcatccacctctcctgcccaaccaggacaggcacccaaaggggaaatgaccatgcatggaggctacagtcagaggcaatggactcgagacctaagatctgaaggaagaagcccgtggactcgggaaagctcgtcagaacatgagtgccctgcatgtggggagacttggggggctgatcagagcacaggctgccccctctcaccccatttcagacatggagagtggggcagctacaaacagctaggtctgctaacacagcagctatgattctaagatcaacgaatgtcacaaaggcagtctgtgtcttcagactacttacttggccggccatctgtctttgcaaaacaccacactgagcttgactgtttaggagcgggggttggtatgggacactggggtgtattaggaacaatacaatatcccatggacacatctaaagttttcatgattatcttaagacccttttgtaaggccctgtcgaaaaatggacaatgagtagatcagtgtatctgtgtcagctacagaagagagggaggagaccaagagcggatgactctatgctgcagtctagactctcctgtcatctctgtggaaaggataaagagagaactctgcttggattgatctctctgttgaggatgactggaaaggaggtttcccatgaggtgttttattaaacagaagaaagccagaacccagaagccttttagttttgttttgtggcttaagcagactgtgcctgactaatccccattgtttattgcaagcaagcctttcagatggtttgacagtaggaaatgggacatcttatcatctggaggaaagaaagaataatcaaacaaaacgacgacaaagcccacggagaagcaccttgccggagagcgtggctttgacaggggctgacagcaccgaggcaggccacgtcaaacacaataacagtaaaggcaagacaacgggagcttgtctcttcacggcaagcgtttagagtcttttcagagcatcaggcctttcgaaagctgccccctggatacaatgtgttcccaagcagcccgggacaagctgcagagagagacaagcagatgtgaccatggccctggcatttggcaagaacgctcactgtcatctgggacaatatccgcctggacagggcatcagctgcacagaagtgaggcgggtctgtggtgtcactggaggagagcctgggtggcagagggatggacagcactgggaaatgcagccctgtgtgaccctccctctccagactcagacgtccacccccccttacccagtgtcaatatgtctccacagattaaactgaacagacaggggtaggctcgagctctgctccttctggaccccaatgcacaccaactatgaggaactttcaagcaatctgttttaataggacgaggacttaaatacttgtttttcagtgttttcttttgaagtccctttgtctgtccatactgcccttccccccaccccacccccacccccgttctccaagagagatagccctgttctccaaggcctcctttggcattttcttgcatgattgggctgggacacactggcttcagactgagctcagctttggttttatgccttgtccagtaactgtgcccactcagaggagccacagtaatgtcactgtctaaagttattttgctgagtaagatggcaaaaagcaaggacaacttggcagccccttccatctttatactgacatagctactgagaaataggacagatgtctgaaactactgacatatggacacaggtatctactttggagtatgtttgtgctaccacatggtactgaacttagctgaaccttatttaggttgcttactagtgaaagtctatgagaatcaacggacttgccacctctctctgcagaaacaattgctcatctctctgaaaaaaaaaaaaatcaaaacattgtgtcttctcccataagctaccatgaccacagcatggacaagtgttctgcatagactatatgccataaaagggggtggggcacatctgatttactgaaggctatttccctcagcaagtgtatccttgtcaatgttatatgcttataaaatggttattgaatgaaatttaaccaggcttgcccagagcttacaagagttttgtcttttaaacaatctttacttttactggttccaatttcactaatatgtgtgtgcttacttgtggaaagaaaacgctaagtttctttggtgagtgtcataggctatgagatatgatgcctgtgtgctcacttactctctggtgttgccattctgcagaatcttgcatctcagtgtaggctttgtagtccctcctcttctacagaaattcttatccaaatagctctgggaaagtaaatatggccaggaggcagaatagggtagcattcctaattcaatgcaatccaaacatatggaaagctagagcatgtcacttcatacttgggactacttttgacattgaaatatttgaaccaaatttcctttataacttttccaattcaggtctattactcattgtgttaaaagatttattttcaaagctcatgaagaaaaacaccatgctatgagaaccattttcaaatataaactattgtttcttttcccctttatagacttttggcagacatacagttttttttttctttttttgttttttaaatctgggaaattaaatttgagatgaccagctgttcaatgagttgtgatttcaaatgttagcacatttttggactcaaataaggcaattttattagtgtttaagatgtcaaagtagaaggctaataagcaggtcaccctccaccacctgcccccccatttcctggccacatatcatggagggggctgcactcagggctcgtacattgtaaacacatgtctaccatagagataagctccagctcaagagaacatcacagggattagaaataagatttgggaaacaacatcaatacattatctaccactgagttatgaaaattattcaacactttttgctttttcttcatatgtaagggggataatcaggagatctgctgcatagggtaaattttaaaacaaggagaattaaatatattaaatatatcattgcactcaatctttcagcttttgtgagaagttgggtgtggtggattacacctatacgcccagcattccggaggctgaggacactgggactccgtctgggttacacaggaagaccccttctcagttctgcattcactcctccatccctccccacccccctagcctgagaggcagctcggacagtggttaggagtgcaagcctaagaagacaggcttaattcttgcttctttgtctactggggtctgcataatagtttggaaatatgctctacccagccacagttctaagagctcagaatttctattgtcttttagatattagctgattacagtgggatgttgggatgtcaggccttggtggggaatggctcctattatgtataacaaaagacttgggccagggcaagtctacacccacccagagggctagtgagacaagatggtgtggtgcgcctgagggctggagtacaggctacttaggaatgtctctaggattaaaggaaatatttcctatcagccctctatacatgataatagatgtcttctaccattaccctacttttggatggttacttaaaatgatggaacaataaaccagggccttcagtatgaaggagagccctccagttatgaccagatgtctcggtctcgtccttagcgtagttgggtagttagcctatcccccgtctacactcctccactcagggtcgggcccagggttgtcacgctggttcagattacagccccaaagacatcagttgggaatagatggcccctgcagcgtgggactaatacagacctgaccacgcatttgtcaccttggacaatgctcaggaaaatgcagaggaaaataaaaggcaagtgtcacaaagctcgtgtgaggatcaagtcagtgagcctctgggtatgcactcagtaaggccctgtgatgagactctgcacgagacaaagagaactgctctaggctctgccatacttttagttacataaaatacaaggaactcaaggatacacaggagagcaaggactggctttatgtatcaacaaagtaaagatacattaaaattgagtatttggaggctggagagatggctcagtagttagaagcacgtgccgctcttgcagaggttcccggcacccacatcaggcagctcacagccacttgccactgcagccccagtgaatgtggcacctctggtttccaggggcatctgcactcatacacatagcaccccggcccccacccacaagcacgtattaaaaaaatacacaaatattagcaaataaaacgggatgcttggaagaggcccaagaaaggctgaggagttatgatcatagcggagagcgggcagcacgaggcagaacagttaccagagagaacaagctgtcttcagagttccaaaagtatgccagacaaagagtaagaacagtggaggcactaggaaggcagggatgggcatctgtccacttgtctgaacaagagatggaggacaaaaccaaaatgagaatacatttaaaccaaacctaatcaaaatgtgtgtgtgtgtgtgcgtgtgcgtgtgtgtgtgtaaattcagggagaaatgggagctgaatttttttttttgaaaaatacttcttataaatatttgattgtggaaccttaagatattttatgctataagacaaaatagtaattaaaataaagatatcactgaaaaaaatgaaactactgggactatagactcaaatatttactagtagaaaatacttgtacttactttcaacatagaaaaatgtatattcccagtaaaatattttctatgtgcaaaataaacaggaaaagggaaaaagctattttaatattggtattatcatctaaaataagaattcccatgcccttgagatggaacacctttaatgtcattcaaaaacagacacattaggacagatgaaggaaagccccgatgatgttctgaatctgagctagcactatcattacagatcacactttctactgggaacacaggaagaagagatcctaatttgtttcctccagaggatccagaaacaaaacagtgccctgacaatctaaattgtttccacttgagacaagcaaagctaccattaaaccaacactctggagtgaacagaaacatttgccccaggtgggacactgtagcaatacctgattaggataacacctgatgaacagaaacacaccatctgtgtctaaaccgatacactcagccctgcaaactgaagctaaaggccagacaagtattcatgaggctttctctgcatcatctttaccacacagtattcaagtgatcggagaggagaaattcttcacagaagcaatcctacatggaaaaaacccaaacgagagaactattttatcaccatgttgtcagtcttcatcaagtatgtggccccgatcaccacagccaacacagcacacaaagagccgaagcaatgacaatgtatacgtgtccctttctgaacagaatggcacaaaagaggaacctgagggcatttagctcactccatctaaaatgccaattacaagagcacaaggtgagaacagcacagagtgacacaggaaaagccctgtgtcacaggtggggctatcacactgagtgacacaggaaaagccctgtgtcacaggtggggctatcacactgagtgacacaggaaaagccctgtgtcacaggtaggggctatcacactgagtgacacaggaaaagccctgtgtcacaggtggtgctattcaaggacagtcaacttgactccccctttgtcttgtgcattcagatttcccaaattcatgccaaaaggcaggaaacacaaatcactgatctctttccaaaaccttctaggttttgggtccaatttgacatcttcaacaacaacaacaacaacaaaccaaagaaaaaggacacatatggaaggagaatgaataattataaggaattaaagacattaaagaatgaaatcaccaaggaactgtgtgaccaggatgtatattcatgcatgttaattaccgttactgtgactttgtcaaataatctgatcaggaaatggactaaggaactgaacaccaagttagtacaaatggccaacacatgaaaacacattttaacatctttagccatcagaaaaaatgtaaatcaaaacgtcacagaaattccagcttactccagtcagagcggctgtgaggaagaaaacaagcactaatgcaggaaaggaaggctgagtgagaggagaaagagccctaacacagtgttggtgggaatgtaagttagtacggccactatgggaatcattctggaggtgcctcaaaaaactaaaaccagatgaacccagctgttccacttctgggtacacacacaagaaatcccagccagcacaccacgggatccatgcactcctgagcttactgcagcatcacccacaaaagccaaatgatggcatcagcctctctatctaccaatggaggcgtgagcacagacaatatggtacccagacaccatggggttttcataaggaataaaatgacaccaatacagaaaaatggaactaggaagtacccctgaaagggatagatagcacatacttgtttcattggtggagcaagttcatttgggaagagtgtggcaaccagaaggaggcggtctggagtgctaagaggacggtgaggacagtggacacaaagttcatgatacacatgtaaagaaatgtcccaagaaaacggatggcttcacagaatgaacacatggtaataaaagagagcttgctattttacagaggtggactgacacattcaagtttaaatcatgacaggtggtgagggtttgcagctggtgagaaaataaggcgctgaacatgtacatccataccgctaacgaatgacttttattgctgaagtaaatgtgatgctctgttatggttctttctcctctctagcacccgtgcctgcattcgtcgccatggttttcttcctcacagccattctgactggagtaagctgggttccacgaagtttcggtttatacttttctctgatgggtggagatgctgaacatgttcttgtgtgtggaccatttgtacttccttggtgagtgttgtttgattcattagcctatgcacacactgatgcttctctaagacagctgctgatagatatatatgagtttcaacttttcttagcatttctccatatataaacatttttcatgataaaacactaaaatctgcttttagcccaaaccagattttatcttttggtccttaagtttcaagtatgaggtcattataggtccttccagaccctgagaaacagacaattcattgtttgtagggactaaatttaaaattcaattaagttatccatgaagcctgactgtgtcatctagtttgggagcttgccccatacaataacctgctgttacaacaaaaaaaaaaaaattacaaaaatttttatctgaggtttattgtccttaggaaggagaacacatagttttcattccatctttctaattagtaatttaagcatatgttcagcatttaactctaaatgtttgccttttccccaagctctaatacagctgtccaagatttgaatgccagaaaacatttaaatatcaacatctgttgaattatgttaatttagtgtaatataattgggcatgagttggaattgatcggaagtatatgaaataaacaaaggtaaattcccatctgtagactggtacacaaacaaaatcaatatggaatgacaaaagtatttattcccaaagagaaaaagtaagaaaaaaaagtactgcatataaaaaaatgtgattaaaaaacaaacaaaccaacagctaggtaaacaagtttcatattattttaaaatttattttgcattgatctcataactgagaagtggcaaaatggtaattaagtgcttaatatctatttgactttttatattattaagtaaaatagtttaattacagatgcgggggcattaaaatttatgccgaaggataatttctgttctactgtgatcaagtttgatttgatttagattccacacacataaaacattactgaaaatagctgggatttttcaacatgggggaagactgtcataggtgggaatactgaaatgaacctgtccacgcgctgtactcatctaagacagctaagggacacctggacttgatcctgagactgtgagacaccaactatccagcggcagcactcctgtgactttcccattaatgaagagggctgtcggcctgttcaggggaggattttggcacaggagcacagtgcatggacatccccaaatgctctgtaatgaagttacaacccaggctgcaggagtgacacagctgttgtgatccagctctgcaggtgcaccttaatcatttcctaggggacccatctctgggagctaaaggttagagctgtgtccgtgcccacttaatcaccgggccaatttggagagtgccaactgtgaaacggacacctgtccttaaggagatggacttcagaccacatttatttcagttaagggtcgctggaacagctcgcacatgctaacaattttccatcattagtgaccatagccacatccaaccgccatccttggggacagagcctgtgcacatgtctaggcatttgaaaacaacgagatcatctgtgggaaagagaggttactatgtgatgagagctacactagggagagtgtatttttagaattttatttactatacaaggataaagacggtatttccagttggtaaactctctcattctctgcaggtcccacatatccaactgaaaagcaaaggctcaaaattcaaattggcgagtgactaatttatttggtataatcataacttaaaataaccctctccagtcattcatttaaaatcttggcaaggaaggttagaatttcaggatggcaaaggacaggagccacgagcactggcaatttgctcacagtgtggttttataaaatacagtaatttggtcgtagagtgtagaatgggaaaattaaaccccttaaaagccattttatgtcacatatgtgggaagtttccaattattctgctctaactatctctagccctcgaagttattcaaatgttctttttaattaggacacatatataattaaatgtattccaattaaacaaatatggaatgcatacattctaattaaagtgaacatgtgaatattttctattagtttggccatgcacacataagaatgaatgggaatcacttccctcagaagggctgagcaaagctgttcacaacaaatggagtcctcctctccttctcaatgggggaagaggaggttataaaggactgtaacattttaaagtcagcgcttaaaggctgtccccagccactctggatatataaaatgccaaccagcataacttgctttaaaaatacggtgttaagagactacagctccaacgtgacaaggacaggtctgtttaaaatgctaactacagcagaagacaggtgttgtctcctttgacacagtgagagcaccattcggctttgctgatatttggaatcttgtgatgtttctgtgaaaggcaacggcacgcgtggtccacgtccttatgcagtttctcctcaacagtccccctctcattattaacagctgctcagagatgtagtccttaatactttcatttatttttggcaaagctgcaaaatgacaaatagttttgtatctgttgcaaattaggtctccattccaagcgacaaacgacagcctggggaagcctgagcacacggaatccttgaacatctttggctctttagaagaccaaataaaaagcagctgtaattctgtcacatctgtgacaaaaaatggtgacacgcatcaagatgtggcaatggaatgcattccccaatggtgcaaacagggatgctcactttgtttttgatacggggaggaaggcaggagtgagcgtgggacaccctcctacagacacaggaatggtgacaggttaaatctgtcttctagcttattagctttttattttaatctactaaccatttactagctttttattttaatctactaaccaggcaagaggaaagcaaagaagaaaaaaagataaacaccaaacaaacacaaaaaagcaccttcctcttcatgtaaggaaataatgtaagaaactagagcacacagtgtgcaaatcatgagacatgaaggaaatgaaaaatacactcctgtggatgaagtgagaagacattatggaaactgacgcaatgtaattctatcaccaaaaatatattttacttggttacaaataacatgtcaaagtattagatagtttgcctaggtgcttcttaccagtgcataccaaaacccaaactttctaagagtctggtaaggaagaggggagagccctatctcaccaccaaagccttcagggacagagaaacatttgatggggataacggagcagagctgccaggagctctcaagctgctcccgggttctcatgtagaaacaccagtcaccagtgtaaactctgggtgggaactatcttcccagcatgacacatgactgagtatcaggcattccttcatgcctgtgaaactggcttgcaatctgggagatgactctgacctttctgttttttactgaattatgaaaataattgtaactttcaatgagggatgacatggggaaacagttgggtttttttttgttgtttgtttgtttgtttgtttgttttttgttggtttagaagtaaattctaagatttgcttaaattttaagaagcaaaatccatcacctgaatgctgaagtttaggtttggaacatgcagggcatttctccactggccgagcattggcaggctcctccccttttatagttaactgtagaaggttccccgaggcagaagcatccttacataaggaaagactggctgagcttccctctggaaacaggatgtcttttgacactttgacccaactggacacatgtccctgaggtatgtaaccttgggtggctgactacctcgtaggagcgatccctcagctgtggctcaagtgtggcatgggactctatccatcttagggcattttttttttttttcctgagccttgggggatcagctcaaaatcaatgcctcttgtcttgtcttttactgtctattcacaagcaataaactgcttcatataacatgccctatctcactggctacagataaggtggtgcccaggccagaattacacagcactggaataggccaagcacaatgtagagggtgttcctatggcttctgaaagtcatgcaggaggtgggcatggtggtgtctgcctgtcactcagcactttggaggctgaagtaagatggctctgattccaggagagcctcgaccacttgctaagatcctatctcaccaccacaacaaaacaaaaatactcaggtaccaaaaatacccaaggatttagctttgttctcactttgatggacagattactcaacatcatgtctgctagtgattaaaatctgaaagtgataagtagttccataagtaacacctaagtgtacttttattcaactaggttttgaaagaagattttgttttcttgagtttctacttatattctgaaggattttgaggtatgtaaaatgatcaaatggcacaaaaaactcttgatagtcactaaacattagacaaaaataaaactaaggttttgaaagttcatggtaggaaatggacagtaaatactgaaccagtggaagaatggatggaacacagaactctacagtgaaggctgggagagtgtacctagaatcagagctacacggagctcagcgaggagactgagcacccatgagcttgaagtccaccctgagcgaaacagtaagtcctatgatatggccataagacataatgaatgagaagaatcaacaagagacagtgaacatgaaaaacattggaaggatatgcagcttcaatcctgggaagactcatgatatgagcaccggagggtgacactatgagcaaacattccacatctctcactgaacacatctgctttaagatagggctctctgaaaaataacaggaagtagcaaactgacaggcagattagaggaacaacatcaactatattgacaatcggtgagtctataatttcatttggagtaagtgtaagtactaatgcagcctgctgttattttattaaaaaccactgggatgtaataggatgacatattatgatgagcagtgctggtggtagagatgccagaagcactgaagcaggggacaaaatccagagaagtaagtcccacactttgatgaacacgcaggagcacaggccagtcacagaacacagtagaaatcttacagaagtcgggcagtggtggcgcacacctttaatctcagcacttggaaggtagaggcaggcagatgtctgtgagttcgaggccagcatgttctatagagtgagttccaggacaatctccaaagctacagggaaaccctgtcttgaaaaacaaaaacaaaaacaaaaacaaaaaaacaacaacaacaaaaaaaaaaaaaaaaagaagaagaaatcttacagaaatgactgaagccaggagtgctgcttcatgccagaaatctcacactcaagtggctgaggcagggggatcattcagagtttgaggtcagcccacactacagtgtgagaccgtctctcaaaagcaaatgagcaagtgactgaaattattgaaatggggtgtgtttacggagattttaaataccacctctttcatgtctttgtatgttagacacagcaccgtctcatgttgacagacagaccatactgctatattcattaatataaagagcacagaaaattacacagtacacgggtcacttcttacagtgcttgaggcaaagagagaggcaagagcattaagtagatatccagaaacctaccactgaaacgtcctgtagccagtagtgttggtaaatatatagctaaggctcttctaggaagattcctgacattcccaaggtgcccggggggaggtgtgctacactccacaggctagaactgtgctttacagcgcttggccgtgtgctcagagcatctgtgaaggaagcctgctttaagagtgtgctgcagtcaaaccctccgcctctgagccttgactcactgcagcagaccacctgtgaacctacgctcctgcactcgctttggatgttctgagagtaaatggtcccctgatgcaatgactcagtgcattacagttctcttctctggcctttatgtttttccccaagttgaaaaaggcaagtgcagtcactcatccaaaagggttaagaaaagtcaagataatattaaaatactaagagagaaaatgggtttcaggagaggaatgtagaataatatatatgaattggaaggtgagcattttcatgttgcatttaataagactgagaacaaaattgaagcttcaatcctatgtcacctttgcaagttgcccggtgcctaatacagcccatggcaccagagcaaaaagaacaccactagtcaagacaaagaggaaatatgggatgatactcaaaaggagtgatttggaaatgagagtacagaaattttaaaaaaaatcaattaaaaatttggattataatatggagaaaattgcccatcagtgttccaagaaggaagcttatgtttgtattatatctgttgtatggttgtgtaggtaagataattgtgtatttctaacatagacatgccatgtatgtatgtgagagacagacagagataggagaaggggaagggagagagagagagaaggaggggcttaaaatggagaactaagggttcttcaatagctgaataatagaagcaagaaatgcaattagcaaacactgaaagacggtggagacggcacatgaaaattctgaggaaaaatgaccttcaaactagagttcaatttccaggaaactgagccatgtgagaaaccctcaaagggatttgcagacacacaaactctcccaggtttctcaatacctgagagcttaaggaaaataataccatgggacccagagaacagaactctatgggagacaggtgaaggaaatctgctgggggccaatgagagtaaggatgctgcacatggcacccctcaggccaggtggacagtacagaacataaccgaaaatggagaaagcggcaagccgagagggctgccacccggacaacaaaccgggagttacaattccgggaagagactattgatggattggggctacaaacaggaaataaagcaaacggcaagataaccttgatctccacaagtgcaagttatacacaaatggctgactaccagctccatgtctagtcccttaatgacaacagacactcagtggagggagcggacaacaaagagccaggcatgggtatattcaggaaggtggaccacagcataggaaactctaaagcagtggtcatgtaactgtgcaatatggctgcacagaggctaagagcaaaaggaacagctgaagtgttcggagattaaatacagagggcaggacatggcagtgatggcccttctgtacgttgtttttcttaccaagaatttaatcttcttaactatgcatgagaacaacatgatggaaaacacaattcagcaagcatgtaggaaacatgcaggcaagaaaggcaatggcaaaacgagagttacagaggccagtgcttgagacctcatgggcaccttcgtctactctatataacaatgctagagagtaggtgatattgctattgcattttatatgcgagaacaagagaaaacttcaatagttggtcagaatcatccaactagatcatggagacactggggtgcagtcaggcatgctaatcccagaagaaacacgtgactataatatccactccttaggttcaactttcaacttactctacagctgttctgaacaacagttgtagacgtctaaggtgccgggaatgcttgtggtacagtgaaacaaaggcactgtgttgacgaagcttggagaggggacacagagaagggaagacatatgaagtggcactgaggacagtgtctgatcaaagtacacaggtcaattcttacaatgagcaaagatgaaggaaggggggggggtcagccttcttccttctttccacacagtgatatcaaatacatatctactgatgggctaatctcacccccctcccaagtcagtggagtgctttgccatcctcatggggtctgacaaaggtctcattttgcatttgtttgttcttcaatagattaagctttgggtttctgagaaatacttagtccaatcagtttacagtttgttgtggaacagaaagactgaaagagagaattcttcccgcctactgaggccaactgtgtttttttcctgtcagggattactataaaaagccgggtcctcttggtcttgaccctgagactagattcctttcctgttgtgctgaacgccccagcaaaaacaacctgaagggtaagggtttatttggatcccgagtgcaggttagaatccatcaatactgataaatcaaggcaatatggacccgaagcaactggtcatgtcacatccacagtcaagagcaaagagcaatgaattaattaatgcatgcatgcttgtgttcaactcattttcctctgtttcatacagctgaggtcataaaccaaaggactggtgttacccactttcagctggggctccccaggtcattaacttaaacaggacaatcagcatggccacatcccgatgactcttcccaagtgagtctagactgtgctaagttgatctgccagtcattctgaccaatattcaggcaagaaagatggaaccattggtatctaagtaaaaatgaaatcttcagaaataccaaatgcatacttgaaaacatactgtcaaaagtaaactgcagaaaatcctctgccctggaaaagaagtccaacagtccactcaggtacctgaagatgaaaaagaccctaaaaacactttaagaaaaagatgatttccttacattttaccagctttaaaacaatgtagccaaatggtgtctctgtcttcagccctgggagccctgagatgggtcctgataaacaatccacaattcactgggtgtcctggttatacagaaggcccctgagctgtgagaatggagagagtcccgaatgcttacctgctggctgttttcatggagcagtttttcttgtgtcctctttctgatcggttatctctcagaagctgatgctatacacgatgtcaagacaaagtagcagaaacaaaaatattactgttacattagtttgcaatgaggaaaatactttgtaatcgaataaacaccagtgtgcccagttgcatggctttcttgacactctctttgttaatgatggccctgtcactggtgcaaaaatgacagccagggggcaatctgtccttgacaactgcagtgactgatctcaaagccagttagcacatggcctggagctccaagactagagttcaggtgtgtcccctagtgctgcagtgacaacaccctctcttgtctaaggctttcagtgttaggtttgttcagctgcgacagttttgaggctgatatgaaagagctgatactgtttcttatgtacgaaacagcctgtcatagcagaaaatacacagaaagtgttctctgaaaaaagttactgtagtaatgtatttcctccaactgtctagccagccatataccttcatatttgctttacacccaattaaactagaaataaagtagatgagaaaacaaggccccagccaatactgtttaccacgtgttcactcacagcatagcttagtttacttttattcatgattatgtatatgcaaggtgaggctcacaaatgcacacctcccgggaaatgaacccgagcaaagaaattttacaggtgctaacatgggacaggcttgtgctccagcaagtcctcaagtcactttgcttcaatgacagagttatcacatacaaactgtgcaaccttacacagagtcctttctgttctaaggtccagtctgcactgatagaacaaatcctggtgaccctgaactgtcaggctgtggtgttaaagatgaaccagggaaacacttaggcagcaccatgagtctggaaccgaaaagtgctgaggacatgacctgggcacagcagttgtcatgttggttacaacggaggagcctggctgtctggctgtccgattgtatggctgagaataccagtaacttctgatgatgagaaactgttaactgttctgaacagttccacaataccactgagaactgaatgctaatctggccactttctagatggcccagactttaggttggaccccagcatccaaggatgtcttagctatgcaaattcctcctaaatactgactcagttccactcacatcaccactaacctagttcggaccacggcttttctcatctgtcacagcctcctagatgatctccctgtctgcagccttgctctgagccaatccactctgagctgtagtcaatatgagcttacttaaatgaatcgaattgtattacacttgaaataaaattcaaaatctgtgtctggccatcatggccttcataatttgattacacctttccatggataacttgctgtggtccctcctacccattgtctaatctctttccttctatgtatcccagccatactgaacattttgcttgggatatggaccatgcccttgctcacagtggctctttgcttcagtttttcaatttgtcagcatctccagggcttagtactgttctggaacatttttagtgctcaataaatatttgttgaatgaatgaacgaatgaacgaataaatgaggcaatgaaatagggcatgagatttgttatatgatatgtagctgaagccatagctcattattgctacttatagaaaatagtgaccatttatcttaagtccattaatctgaaagtgtttcaatttagaaacacttcgtcccatgaacgctaaattggttctgaaaataaaaaaattaattgctttggcatttctaagtctagtgccttcaagtctatatataaaccaacatttgcgacacagatagctctaggtaagatgacaaaatctcttttatcttagattcatgacagttaattaacttctcattttaagataaaagttactggaattattttcctagggctggtgttaagacagttcaaacacctgtagcctgcattaagacaaagttctacaacagatttgaagttgcaaccataccatatgacaggctataccaatctagtctgggaggctttcagcccaccacctggatgaggacacaggagacgatattgactttgaactttgtgttctacctcctctgaatatcccaaaattcatggttttgatggttgttatataaaaaagataatgactgcaataattcatttgatacacacaaagacatgaaactacttcaatttaccaataaaatcacaaatcaaggtcaacaaagattttgaaatgaagttgtgataaaaaagatttagatgcctgggccatgaagaagttaatgcatgaagctcaatgtctggagaggaattgagaaaggacctggagtagaaacatgcttgtgtctgaatactgaaaagaggcagcagactgcactcacagtaagggcagctgcaagagccactcgcctgcccgagaggctcgccatttttaacaggctcttcactgctttgtgggacttctatcagggtcacaggtaaggtcactgtagggttatgactcatcttggttaagagcagagcttctggatatggtctgagtgctccttaccttcaggatttcagactggggtacttaggtcaaacagaagtacaatcccctatcagccacctacaggtgtgcactagaaaatggcccacatgaggacagcactgaatgcagcatgtaaaaccacagcacacaagcttagagctgatgtagtcaaccaggaagacaagagagggttactggtagctcatggcttcaatgcataaagaatggaacccatatcagaaggaagaatggaacccatatcagaaggaggccacctattccactgtcctgtggatacagacagcggatagctggccaggagcacctctgctggcacagtcccttaggaacccctgaagtatctgcaaagtcatttcaagtctccttagacttggcctttcagtgtcctcaacagtgaagagcaaacaaacagtgtactgcttaaaccatgaccaatgactcaataaggcacttgtaaactaaggcacttgtaaaatgtcaagtagtaagatgttcaaggaggcaaagcctcaggatctaaactcgtgcttacacacacacacacacacacacacacacacacacacacacacacacatacacactacagaataaaaaaaaaggtcacaatctgactggctgataatgatcctgcatccaaaagcaggaagaaactagttctgcacttcctataagaacatggttcagtattcaagaatttagtgttggagtctactgatacaacctaactaccacaaatgaaaacattacatacatttactaattaataacttacctagtcaagacaaaaatgtaagatacacaccaaagctaaagcaaaaggtcaaactaaaaattagtcaaaaggattatgaaacttaagaagtgaaaaagaatgggtaattttcctctttagaaagctatgaacaataaatccactctttctcctggtgcagaactgagcccagggcctctcacatgccaggcacgtgctcctcacccagtcacagctccttagggtcttgtgaactttcagacagtactttccttatagatcatgtgactaaaacgtaactctacctttaaaaagagtacaagccctcacaaggagtcacacactaacctgtaaggcaaagggctcttcaaaatcgaacttctaaataatcttagcacattttacagagacaattaatacagtcaagagcaagctagaacacttagtcatctgtaaagacaatcaatgctaatgccaggccccgcgagtccagctactcactgccctaacatgtatgtcaaaacgatagcttaaagcacccacctagcaatatgccaaatcttagaagaagtctgtactgcctgaccttgaatttacctgttgacttggaattttgtgacaattcctcatgctgaccagggccaggatcactccgtggatgaggatgcttcatctctcaagcactgaactacatacacacatacggcaccacactcggcatttattagtaaagccctatgtggccagttccatggaggtcacctgtgtgcctgaggacagtggaggtgggaggaccttccggtgcctgctgaggtcagaggaaagctccagcacaattagctccttttataataagctgctttcaagatctctgctgactcatgaccggagggagacagacacacagaaggagactgttccttctgggttacaaggttccttacctggccatgctcggtcctagccccagggctaaaccagtggctgtggagagaagaagagctgttagctggcccctccccagaagcacttgctctcccatgaacagtcagcatatgctttaaggaatttgttcacaccagctacagaaccttaaatatgctttattttaatggatatttcatgtaattctagacttacaccaattttgacagcaatgtaagagtgctcataacccagtaatttcaatttaataagcaaacggagttagaattacatttccatttaattatgttaacataaactgctgggactgtgttcattttacaaatcaattctggttataaaatctacaaatgctatcatttgccacaacttaattatagcatcattatgccaaattatgaccttttgattattggagttatttaaaaagagttggaaatgtaagaatatcctattctgcaggtctgcactgaggacagaaataaaaaattcccagaaatgagtccagatcatccacgacttgactttggataccttccttttacagctacgacaatctggggtttggatcacagcaagttacaaaatagtgaaaacacaagacaccgcacagtcaaaggctcacattattctactgccaagcccagcccttttgcccctagatcccacagagtctcaccttacttgtcagtgggagttctttctagctgcatgcccagtgctccagtagcacacagcataaggactgttaaacatctaagactaggaaattgaggaagacattgaaaacatctaagtgccatttagtggtaccagaagaacagcatcttcatgtactctagcctctttagagacatgacttgtattgccaatcctcatgaaaaccttagttccagatatggacatgagtatcaggatctcctggccaaaatctgctgtcagcacaccatgctacagaagggcaacgaagactaacactggctggcatgtctctaaagtctctccaaaaccactatgcattctctagcttcgggggcagctagctgggagtgagcagcctccttgggagtagggcccgtctacattttctttaagcatttctccaggtcacggctggtgatgttccccggcaggacagaacccacaccgctatgccaatggacacttaacgggtattagtgtgccgagtccagattagccaccagctggaagcaaactttcaatgagagttccactgacagcttgaccaagatttcctttctgctgtggattgttttaaagcgaagtatttaaggatcaaatgtacaccctagttaatcatttcataaaaggatttcaaacagcagtccttcctgccagctctcccaactcgaaagcccagtgcagaaaacagagcttctccttctcaaagcatgctatcttctgtaagaataagacagtggtggtgcatctgtcaggacctgttatcatgagtgtactctttcccatgggctgctttagcatcctaccactatcacgaagggacacttcctgccagtgagcggtttctatgtctcccatgggtgctgctggccttgctttttctctgctgtgtctttctgcactcccttcagccttctctcaaggaagagtcacatctttatcacccagtgatgggagcgggtgggggtgggttgtccaaagtccaccctatttcaagtgttcagctgttgtagggaatttggagaggttttctctggtgcttgcggaacttacacccttcctgtctgctgactggaacttacaccctccctgtctgctgactgcagaacttacaccattcctgtctgctgactgcagaacttacacccttcctgtctgctgactgcagaacttacacccttcctgtctgctgactgcagaacttacacccttcctgtctgctgactggaacttacacccttcctgtctgctgactgcagaacttacacccttcctgtctgctgactgcagaacttacaccctccctgtctgctgactgcagaacttacacccttcctgtctgctgactgcagaacttacacccttcctgtctgctgactggaacttacacccttcctgtctgctgactgcagaacttacacccttcctgtctgctgactgcagaacttacacccttcctgtctgctgactgcagaacttacacccttcctgtctgctgactggaacttacacccttcctgtctgctgactggaacttacacccttcctgtctgctgactgcagaacttacacccttcctgtctgctgactggaacttacacccttcctgtctgctgactgcagaacttacacccttcctgtctgctgactgcagaacttacacccttcctgtctgctgactgcagaacttacacccttcctgtctgctgactggaacttacacccttcctgtctgctggctcagtcactgccctttgggtctggaactgaagattccactacactctcttctctcaccacttctgtagtttctgccttcacaggatttgggtgagaaggctaaaaataagttttgcaagaggcagataccctaaaaggcaggttgatcactgaagccaccctgggattaagagtgtaaagaaatgtaatttggcagggtctggaagggtcacggggcactttgagaaagttcctgaggtgggatgtaaggaactgagatcatagtgcacagatgggaaccaatggaggagggtgtgaagaagtaaacaggcctataggagtgaggaagagaggctggggcgggaggggaataaacagtgtaggtggaggcaacttaaagatggatagagtggatgacaaacccccaggaaagaggaaaggactgattaaaatgcaggtgctggagtcaacagtggacaacgaatgttatttcctctaataaaactgcagaagagggagtaaagaatggtatgagtgcctaaattcatctaaaataaccttattgaacaaaggctgtagacaagaaggagggagctggcagaatactgggaaatcagaagtccagagtccaggagttctgggtggttttactccagagtaaccaagaaaatgcttttgtgttccagtagcatgccagggaagctcactggtcaagggggagcagtcctgtgcccggtgctggtatacactgttcatgcaaatcttcctgcagtgccactggtctcagtagcaccctacaagctagacagcacttaatcccaaactctcagagtttctgtgcaaacaaagaaacaaggtcagacagatgatgtgatttgccaaagacttcatcagtaacagttggagttgaaaggtcagtgttatgattttgaagccatggtctaccagccaccatacctgtggctaccaagagaaatgcagcaactgatgcccagagaatgattcaaggttccagcctcctgcgaataagggcaagtaaagaggggtaggtagaaaggaagaagctttcctggggtgcggtagaggaagggtggtgtctgtgtccaccactgcagaaaatgagtcaacagcaggctgttccctttggccgtctgtctacctcaccctggcagattcaggggattcctcgtctacaccttcagtatttttgctcacacctatctcctttcaagacattaggttcagacactggggtatttatttaccctggtaaaggaaactggggtaccttgagagagggatgtagcaagtcaaaaataacagcaatggcagctgtgaaatctgtggtagaactagctatctaaagcggtaaccgatcaatagctgcatctaaggaatgctcactgcttacctagtgccacgcacaggtctgccccagcagttctcatcacaaccttattagatctccagagctcaccggcacgcaaaggctggcacccactgggctaacaactgaacccagaatgtccaatgctgggccctgtgctcttagtcaaccttccattacaggagtttcgatggagcagtttctgtgctgtttcctcccctttttgtgctcacagagcctaggatcatgatgaggaaatgattttgatgactttgtcttaaaaacaaaataggcaggagctggggagaaggctcagctggtaaagcgcatgctgtgcaaacacgaggacccgagcttgatccccagaacccacataaaagcaggcagcactggccagccactcagcactgaggatgctcagaacggaggcgtctcttggacttgccggtcatccaatctaaccacacgagaaggcttggtggacacagactgtggaggatgctcaatgttaatgtctggtgcgcacacgtgcatgcacacacatgtacacacacatgcacatacatgtgcgcgtgtacacccccccacacacacaccaactaagaaataaaatggcagtagtgtccttcatatgtgtgtgaagcttacgtgaaggctagtaccgtgagccagaacatggctgcaatgatgtttccatacatggatttgcacttagaatcaggatttcagagcaggctcacagaaggctaacagtgaaagaagcagaacagagagaggctgaggcacaggccggcagtctgctcaaggcagaagggctggatgttaccactatgctcagttctcccggtgggacacaggtacaggctgggtacatctagaaacagagcctatcacacccggtagggttctgctggaagcagaagtctgcacctcctccagagccctggttgcagtcatccttcaagcagagcagtcttgtaactagagtggaagggattgtatttcaggtctctgtagatgctgagcactacataaattccttctcatgcttccataatccctttccctaaccacagagctgaatagcaggtagcagcaatgtattggatttcacaggcagtcaactaacattactcctgggcaaaaagacaaagccaaccctaagatgtttgactgaggactccagtaagttttactggagtaaatggtaaaaagtacttttttataaatgtatataaaatgtacttttatatacagatttttagaaataatgttttccttttggacacagaagcacaatttttaaataatgagagagtaatataatcggctctctctctctctctctctgtttaatatagcagccattagctagatctacctacttaaatttcaagaaatgtaacatattcaggtcctttttgaacagacacatatagggctacaggcacatacggcgtagggaccatcactacgttcattttgtgtgtaaacatacgcactactgtgaaaaatttactgctctaatagagtaagcattgaaaatctaaattagctttgaaaacgccacacaatcttcaaccatgaataccttcctcgtgcagcacaggtctgtttctgatgagatttgtaactatgaagtacacaacagaagggcggagctggctatggtggcacacacatacaatcccagcactcaggagacaggagagtggtgagctcaagtctagttgaatcaaaaattaaggcaagatggcccagcatcagcaagccacatggctaagaacttggcctttgtagctacctcaaacgtcagtgcaaagaacccaagaacggggtgagggtgggtgggtggggtggcagctaacctgtcactatggatacagagggctcagatataacaaatgaaccgactgcagtgacttttcactactcatcacgagagactccttaaccgtctcaggcgtggcctcctccagtctctcaccacgtgacaatctgccttcacagtctttcatctctcttagttttcttcccgattacgggatgcagaacatgggattttatttgcttgaaatgtacttcccacccccaattgaccacactttcgagatttatcagttgttccaggtggacgtccagttccgttttaagaatgagagccctgacctccgtacacattacatgacaatgtccacgcactgtcatgtaactgcacatgtatgtgtctaccccctgaccactgtctgttattcattactgataggtaaagcccctgagtaccatgagcacagtgatgatgtctgtcttgttttctgctgtgtgtctgccgagggaagccctcataggtatcctgggaagagtgcctaagagtaagacttgagacggtggccagagctgaatcaactacagtgccacggctttctctcctaagatatttctcctccattaaattgttctgtgatgtaaaacatcaactctaaaatcatataaaggaggctctttaaaagcttaacttactttattaaaatactaataaaaattcagaatattaccttgatgtgcttaacaaaaagaaaaacgaagtttgggaccaggctatggaacctctcagatagcttctggcaaacacatatttggagtctaggttcctcccttcccaacaaaagtgacattgggggtgccaagacagctcagcacgtcaagttcttggcatgaaagactgactctcgaagctccacctctggaacaacacagggtggaagaagatgaatgactccacaaagtggtcctctaatctccacatgtgggccatgctccatatcatccacacacaatagaaataataataaaaaagtaagaataaagaccttgctcaggactgggagacaaacataaatccaaatctcccattcagaagacagctgaaatcagtattaatgtcctccctaccgtacactgtgagcaacagtagcacatgtggcttcattctgtgagcttgggagccctcaatccccacagaagaattgataagactggagtcccggcagggttcccacagaacggcatgtcacaggacacaccagagatgcctaaggtgctgtttcctaattgacttctggtcaagcagagttacactgggtggctctggaaaagtcaaagcacctacaaaattcagagtaaaaacattaaaacgacacacctcaaaagcaaaacctgttgagacgccaactattctgacctgaattttgaggtactttctagtggggaatgcctgaactcagcacagcattctgtaaacacctcacataaggaggctgcctcactattccataactgaacagactcacgcccacagcgaccctgataaataagagaagaaactgttacagcacactgcctgtaccttaacctagagttaaagccactttccccataatgcaataaatgctgaatttacaagtgaaaaagtattctcaatgaacataacctttaatccaggcaaatcttgcttaaagcaagcttgatatttacacaaaagataaaatgtgtgagtatttgctttatgaaggaatttatcatagaattataataagttatctgtgtgtacttttaaaagttaattctatatacagctttggatgtagatacattttatatcaaaataaaacaaagcagaatatgaatatcaattacaaaatcaattaattaatcataaatatctctttaaaattaaattatgtatcttgtgagtaactgagcaaagttagagagcaaataaaagcccggaaccttttttggttttcatgacaggaccacgttatgttaccctggtcgcttaattagatgcagtgcagactagctttgtggtctctggcagtcctcttgcttcagcctcctaagcactggcaatagagggtgtgccaccaagcctggctctgacacatatttctaagagggagccatgtcaatgtccataatttagtatttgcatattttgaaaggcaacatattgatgacaattgacataatattgacaattaaatgttaaaacattgtactgtaagattactcttatcattggttttagttttgctcatgtgtatgtgtaagtgtgtgccatgtggatgcaggcaccaacagaagccaggggcagtggatcctgaggagctcaagttgcaggggtggtgagcttcctgaagtggatgccagggaactgaacttgggtcttcgggagaacagtgtgtgctctgtaactactgagccacggttctaggctcctcaaacgcttttgcaccagaagtcagacaccagcttcactgtgttagctgggttaagaatcttggcacattctctgtgtgtcttatattaatgaaaacttgttttatctgtgtcaaatatttcttgctagaagtgtacaagcatctactaaggactggactttcaacatgatgctatttgttttccaggactaattactagatagctttcttccccaatgagcagaaaacacaacattattttattaagttggtcacattttgtaagtatggtactcagactttctggtgtgtggtgcatgtttccaggaccctacgttggaagaggtgtgtagcaatgctgccatcagacaataacaatctgaattttgtttctgtaatggaaattatcttcagatgctattttatagcagttaatgatttagttgtttagccactgaagtagtaggataaccctagggcaccatgaatgggacacaggtcataggtgctctgggctgcagtctgctcctctactgaccggcctccatgactgtgatgagcccaggctttctggatgtagcatcccactgtcattgtcctcctgactctaaaaccaattttcccttttccagctgggaggctcctgcaccttgccagctatttcttcagagcctggcacagagacagagcactgggagctggggtgctccagcaattcccattcaaaacggaaaaatcctttcattcttttcagcctgcataggagctcactctattcaattctattttaacttggacatctgacaagtgaaagcatttattttcatatgtttgcatgagtggtgttccaatgttcatgtttataagggtgtgggcacaagtttgtggaggtccttaccctgtgtggcaagccctttccccacgggaccacctctccagcaccagaagtcagactgtttgaagtatttttcatcttccgttgagatggcctgccttctccacaactctacactgtgcgtgtgtgcagctgtttatggacaagggcataagctgttttacaaaggggatccatgagcagacctaattaacaatccgtatcactcagaggccctggatgagagcctgaggagatggagtaaccaaccacaggtgatcggaaaggggctgaggaaggctggggtagtctgcacactgtgtatgtctggaaagaacagaacatacggacggtgcagagacaatgaactgggcatgacaaacccggtcttcacccactggacaggatctccttgtcaggctccattattagagtagctatgcacctcacaatggactcattccctgtctggaacttgactacggatcttctttcctcatctcctttaagccgaaagacaaccaagtattccgattgtggtcaatgggtgagaagtggaggtaagggggtgtgcacagcatgggagggggctgcgagcactaccctctccagagcagaggagacaagggccagaggcagtcatctccaaaccaggaggcaataaacatgagggcattagagacggacaacaatggcaatgttactgcaaaattgtgtccccgcaaaagacagtatggagtcctaataccacaagccaaatgaggaccttatttggatacaggctctctccagagacaagttaaaatgaggtcagtgaggcagggcggcagtccagtatgacattatgaaatgtcttattcatctgcctcagtgccgtatgaaggagaaattcagaaaaagaccagttcagggaaaagcccactgaagatggggctcaggaagagagcagcagagactgctggtggcctgtgaggaagcaggcccgggaggggacctggggcttccaggccccgcacaaggttttgtctcagccatctactctgtggggatttgttacagcagcctaacaaggaatgcagttggcaaagggagaaacagaagcggcctgccctcatcaatattcttaagatttctaaagtcccctttttacactatgtgagaaaacaaaacaaaacaggaaaaataaatctgaagaataacaaagatcaagcaaacccaaactatgttggttgaagtttgtactagcacatactgacaaaagctttctgagtcttgaccaatacggctaggagcaaatctgaggggcatggggcagtgaaggtgaaagcaggaggcttcagagaacagacgagaactgatctgaaggttctatgggcagagaagggaaagaaggggacagatgagcagcaagcttggctgtgcagggcgtttgtccatgattgttagagtgtccacactggcagtagatgacaatgggacagtcaggaaacaagatgaccagatccgaaccggagtcacacaagcaagtggggagccagctactgcggggtccactgggactctccactgacataaaagataatagagaaggcagtggggtaggaagtgggaaggactaggtcaggagagacaccgggaacttgactagagacactgggaaggcaagggtgtgaaattagagatttgagtcctatgtggtcaaacagtggcaatcttcactcaggggaacacacctgtgttctactcctcgagtgtcttaactgaccagcaaccttggagatcctggggtggaggagacagagggacactgagagtgagctctgtgaatttagaggcaacattgcagttggcactatcctgttctttctcatttacttatctactcattacagtttttgagacagagtctcatcaagccgaggctggccccaagcctgttaaatagccaaatacgacctttaactcccgatccttcgcctccatgtccacaagctgggatgggcacgctgttatgtcccacacagggtcagtgtgccctagtttaaaccagtactggggtcttcagccattcagcaactctacctggtgtctgccctatcaggggctgggctggggcaggattgcagcagcaataagggaaccatcacctgtctgcagagtgcctacactcttcacctaaggaagagttttatctgaaatggggctacatctaccaacctaagcctatatagttcaataaagcaaaatgaatatggaaactgtacccattggctgttaactggggggtattttttgttttgttttgagcttcttcacagcaaacaagaaagggggggttgtgatatcattttgcgaggcctgaacaaaagtttttttatttaggttgcaactgattttgtttttaaaaagaaaggaaataataacagctcttagtaagacaattttctaggaaaaagtaatctagtaattcactcatgccttttcatatctcagaggtctcaatttcaactaactgcagatggtagaagagacacatagcatcaaactatcacacatcacataggcttttccaacaagactatttagaattaagatcaccaccaaaaaaaaaaccctccctgtagtttactaaagtcatctgaactatttagctatctaaagttagctagtgggccatttcttttgttgctaaaggatgttcatcttggtttcgttatagctcttcactgtgataagccaaggctagccaggcagaagctgggaatggagaggcatcatgaagatgggtcctttggcagtcatgttggtatcacagaagggctggggctcggtaaggtcaacgtcatgaagatttaaatgctgctaggtagagcctgatttcagggactaaggcatggattccaaattctatcaagataaagaatgtatttacaagtccttctgtatcagttgttcctatactgttaacatctgtgtgccttattatgctttgaaagcaggcacaaattaaactgctgtcactcagaaagagctatccagtttcttcacagacacaaatggaataagccaagcaagctacagagacatgagcactactcactcatggtgatgggcgtctggggagaagtgaaccatcctcttgttactggcggggccaggagcagacgtctgaaaagagatttcaaaacaaatgacaaaacaagtcaccattggcttgctaaagacagtgcaaggctgcaacaatcttaagatatcattctgaatggaggaaagaggattaattaaatccaagacaaaatggctggcaaggagcgaaagtcctggtaagactggtcccatgagggatggacagcagtgatgaccccagtttgatgcctagtacccacctgaaacgccaactctacctctctttggcttccataaataaaataaatctttccaaagaagatcctttggtctaacagactcactttcctaggtttcttcagacaccgacagagcatctctatcatggtgcaaacaccatgcttacggacacagcagtgactgccatccaaacactgtcaacctgatgtgagaagaggttcaatccgactgatcacgcctgagcagatgctgcttttgtgaatccagcttctgtggtaaatttctaaacacagaagcttgcattatgatgtgcccattcaagcgacacaagcacttctgtgaaaggagcagcgagtggtcctttttatgtattttcggcaaaggcaggaattatcaggttatttatactgagtgaaatgcaattttagcaaaaggaacaacatttgctcctctattctacgtaaaattagaaattctacaaggaaaacacaaagtgtttcatctatagtaacaactgctcaagtctggtatgaacttcacagcactcctactctacccaaggttctccagtgagcaaaaggtagccaggaaccggtgaatctgccataaccaatgcccaggtgtgaacttactctgagtcatgcttcctcatagtgaatgccatgcctgtttacgtacacaagagccatttaaccacaacagaataaaaaagcatggcctaagaaaagtaaaaaaaaaaaaaaattgggaacccttcttgttgtatcccctgagtaacaaggatgcagcacacactctggcattcctagaagcccaaacggggccagtttgcaggggtggcagtgacgagcccagggggcacacgggtcacaccgcacattcatcttggagtagagactcgtgttactccagcaggtatccctggaacacagtaatccattttctacactggggctgggcgaaaagccgcctgggcccgtgtcatgctttgttagacgtccatgatcacattatctcatggcggacctgacacttttattcagtttacagtatgttctatgtacaggcaacttatttcctctgccagggctgctgacaaccttttccacactatattaatcttgtttactgactttatcttggtacaaatatcagaaaactgaactttttatctcagagaaaaaataagcagtatgttgacagagcaggagctattctcggggctaaaattgcttgtttacctgaagctacactcatgggaaaaatgtttgtcttgctctggcttgaaatacataatctgaaatttaataaatgaagaaatttcacatacacccatgtgataaattgcctgatgaaaacaatacgggggaatataataaaacagaacttctaataagtttacagcacaatacaaatgtaagctttcaatccagtcagaagtaatctgactggatatttttcaggaattggacacgtctcaaaaactacaagctcccttcaactgcagcagataaatcacagaagatttgaagaatcaaatgtagacatttaaataactttacatgtatgtttacctggtcacggccttggaaaaacacaaatgactattctctccaattccttcgtaatgctgggaccctttaatacagttcctcaggtcgtggtgaccgcaaccataaaattatttcattactacttcataactgtaattttgctattgttatgaatcataatgtaaatatctgatgtacaggatatctgatatgaccactgaactaaagtatcactactgttattttgtgagggtcacacctcagagttcaatgtctttacaaggagaacccttaccccaagtcttcgcacacaatctgcaacacagaatccctccatggaaagcaggactgtactaaagtccgagagcattttaaactttcaagatgcttaacatgattgattattagcatgatacattaatattaattgatattattaacttgtcataaacaaacctaaagaactgtaaatatttatagctgttctatgattaattcagggtctacatttataaaaacccaatgaaaagaggctggggagacggctaagtggttcaagcactcgtggctcttgcacggcacctggactgtgctggccagcacccacctggtggctcacaccgcctccagttcctgagacctggtgcccctctttggcctctgcctggaacccgctacacataatacactcatgtacacacatacacacacgtacacatagagcaaaataatctcagaaaagaaaaggatatccaaaggttaaggtcaatggtgcagcccttggccccgcccctgaaaaattttccaaaatcagatcatatggtgactatttaattctagagaacatttagaaagaaatcataaactattttaagacttatctctttaagtagccaagtcaaatatgcatacagccaaggatatttctggattagtttgtgacaggttctcggtatataggtctcaccataattcctggctggagttacaactcgctatggagaccaggctgactttgaactcacagaatcctgcttctgcttgccagcgcctccctggtgctgggactaaaggtgtgcaccaccacgcccagccagacagttaaggtgattagtagcaagtgttctacctcaaagattagtggaacaagaggcactttgcttttcacactaaacagtatttgcatagtacagagttcttgggagtcaaagaacttagaggtcaacatttatttaatgagtcagtgttagcaatgatgatcccagacatcatatggtgaaccctaactctttagggttcacttgctaaatattactacacaggtagtgagtgtggctctaatgtttggttacatcatttgtgcttgtacaaattaaaacagaaccccagggccagaaagggacagtttctatacaatgtaacttttctgctgtgatgtcagcttctgtggctgtaatttgcagctcggctcctaacctcagaagacactgtggtagtgagagatgaacacgtggccacaactgtgtaagaaaacagctgctgacagaatggaagcgcaagcaggtgaccctgtgaggacacctgtactctcagttttacagacacatctggagccaggtcttcttctccatcatgatgtttaacacactgactgttggtctttggagacaagcagagcagttggtttaccattttcccattgccaaacctcctgcaggttcccattacagagctgacatatccctccttgaatcagaaactgagctgagacatgggtggtgagactggggcaggggctgcccagtgtggatggcacactactcaggatgtcctgttaaagactcccacgggatgcagctccaccccgacagcagtactggaaaccagcagctgtgttctctccctccctccctccagctagccttcccatcaaccccgtgctcattttcaaccgcacttgagttgcctctgtacactattctgccccagtgcccacagtgacaaacactaactgtggcaggctgccattcaaaagagggcttttcaatttgctgaggcctggctagtgaaagccctgtagcctccaggctgaagggaggcaaggcctgaaccgcctgccagtttgtccagatgtaaaagtttcctcttttctcaggataatgattaatttgaggacactgaggagaaaagccagcctttacagtcaagcaggctctacacggaggcttcaactatgctcaactaatgtgtcagttaagcacacgtgccaggtactgaggaaaaccacccaacaaagacaagtttcaaagtatgaccttaaagcttttgggcatgggaagtgagagctggagggatggggggagcaggggacaaaaacaaagcaaacaacccaccccccaccccaaacaacaacagcaaaacaacaaaaacccaaccattcatccatccatccatccaccacaaaaacagaaggaaactgcttctggctgccagtttctggtgtacagagttatcttcagttttcaaaaaggctgaggaaatgctactctataaagccagtctggtaaatagttattccacctacacctacagacactctccaagagtacttcagccgagcgaggcacctgcagtgccgaagcagctgctctcaaagctttgttgcaagttagacaagggtgagtaatacactcacaatattacagactggtctcaatacacaagggcacaatctatttgggtacctacacagattaaagaaaataaagcttacaattacttttaaagcaacatgcgaaaaaagtaaaaattattgtggaataacttataaaacccacaaaagtgtgcaactgagtgataacactagagtaaggggaacacagagccatgtggtttaagaggaataaagggggacacagcccttccaggagggtagctggataaaattggagctctgctctatccgtcttagcaacttgctaaatttacctttccaaaccgcagctttgctcccattccacagctgtctttggctccacaggccaggaagaaggaagtgaatgtgagcccccttcagatgctgctctctttagctgcctacctctggagtcaacacacttcacacagcagctgccgcctgccctgaacacagtgtgcaggcatgctgcacacaactgaagactcgcttagaagtgacccagcacttacacacaattatgcttacacttgactatgtgacaagcactatactgttcccattcatccggtggtttttggtatactataactagaaaaactcttagaaatccccagttacattccaagctttactgctattttcttctttaagaatggaagtaaccagtgggctggagagatgatccagtggttagaggactcgctcttcaagaagactcagatttggttcccagcacatacatggtggtgtacaaccaactctaactccagtttcaggggctccaatgccattttctgtcctttatgtacttgcaaacgtgcacgcataagtgaaatttatacatacacataaatattttttaaagaatgagaataatcagtaaataataagatagttaattactttccttttctgggtgtttacaaaagtaaaacatgcacttggaaagtggatcagggaagtttctttaatgtgagaagtgaaagcataaatccataggaatacatggtgtgtgtgtgacaggtgcatcaggaccgtcactgcaagtcctcagccagcaggaggtttagctttagacaatgtcctctagaaaggatgaatgttcacgaatgaaaacagtctatttctatggacaactggattacctgagatttcaaacacggaattattacactagtaaattaatacaataacttaagttttccaactaagaaaatgccccaaagtttgggattattgtctacgcgctgtacaggtgcacacacgtgtatgtggacgatggagggcgatcctgagtgttgctcctgaggcactagccagctttgagacagggttttccatgggtctgcaatgagtaaggcgggccccaggcatcctggagaccccgcctacaagcactgggactatagtgtgctccactacacccagccttttcaccttgggctctagggaccaaacccatgcttgcaatcactgtattgacaaagctacctccccagacccaaggttggaattttttaatcctgttaatagtatggaaatatataccaggatcccttcatctataacatctttaaaaataccacgttcacaacaagcttgatcctagcagcagagctgtcactattagggaaaaaagtatccataaccttacttatctaaattaaatgagtggctatgaatttccctgtcagtcaggatgaaatgtttcccactggagcactgtgtttcactgtgaaaagtttaaacccatttggaagcattaattaaagaatcgacaaactaataaaaaaaaatgtgaatccctttgaagtagaagacagacaaaaggcaagtggtcatgccaagagaccacaagcagctcccaaaagggagcaaagaactcctgggttaaacaggtcctacgaggtcctgagaagggggtccaggcaaacccatcgatcgggaggcagagagaaaacgaggcaggtaaggatacattccaagggcagagccccactctctggacaacagctgacactatgtctatcttttctttaataacatctcactgacgacatttttctttgtgtcttgtggaattctttctcaggaggggacaacaacaaaaagacccttctaccacagtaatcagaagaggcatcaggaattactatagcaatgcaatgctcctattgttattagtaacaatgacattcccattctttatagcctgcttgtctaggatgttccataagcaaggggcctcaagagcaaagaggcactctccgatgacagatggagaaattcacacaggctgccatcaggggcacagtctagactaggaactggccagggagggattgaacccatgctgctgtgctcaccaaacacactcgcattttgctcctgcaaggagacaacacagcaaagcacatcttctcaagtgcggtttcctaccgaagacagcactctgcatcacaaatacacttgaaaagctttcaacccagaatgataaacctaagcacaggcaggaacctccctgaaaattctagaccacataaagcgagaggggcttgacacagtagagacgctggcacacaggccaggctgtcactgtgacagcaaacagtacaatgcttaacagtactgggtgtagatactcttggatgagaacatgataggaaacttggagaaaaattagagcttgttgttttttcttttaaaaaaccaagtataaatctaaatacaagaaaaagtgttttttaaaaaaacaaaaccagggaaaataattcacataaaattatgggctttcctttcagctatgctggcagtctggagggaatcgggcactgcagagcttcagcctcccagtgagcactggatgaacatataggtatcattcaattttgaaatcttcaggtcacattttcaacaaatacagacacagttttctaaggcctgttaaaacaaaaaaattatcctaacctgataatcatatagatatatgtatatgtataatgcacaaactaactatctgcccacaaataccctgacgtatgactaaagtacacaatgtaatgatttcaaatccccactgtacacagcttttcccagttaatatatagtctgtatgaaccggaaatttagaatcactagcctattagaatattagtcattataatgaataaatgcacagattcatgtttctggtatgattaccaacagtatatatttctatattactaacagcaattgttcaccttggtgagtaatctcaatgcttcaactgagaagaggcaccactgcacaagaaaaaggcacagtggtagctgctttcataccgctttacggcctttttgctgagtgacaatgtaaactttaagcagctctgaatgatgctcaacagggctacggtggagtttcacttcccatccagtttcagcaagctatgagtggcctctactggctgaccaggggcttcaggaatccttcatgtacacagcttgccacattgtgggttttaagaaggagaagacaacatatgtagacggaccagaaatacatcctcaggaaggcgtgacgctttaacatttcataaaattctgcacacttaaatgatactgagcgttcacattctttccaaactgaaatttatgccaaatagtcactttctttttcaatccaaatcaaagcaattcaaatgtacttttaaaatgttttcatgactcattttttaaaaaacatacacatacagaaaaacacatctctgctcaaaatattgtgcacgttaatttaagccttaacaaaattatcttgtaggcatatacaaagaaagatagaactaaaattctttgatatcattttcaatttaaaaagaatggtttgacattttgtgcaatggtttataaaaatactatgctagcgggctggggagatagctcagcagttaagggtatctgctgcttctgcagaggacccgggttccaaccccagcattgacgtagcttcttaaaactgcctgtcagtctaagtccagggactctgatactctcttatggcctctaatggtacctgatgtacgctatcatgcaggcaaacactcatgcacataaatacataaaataaaaataaatgaatcttcacatgcatatgatcttagaaacatagtaatacaaaggaaaatttaaaagcattattaccatgactatgtttggctcaaatattcattttcaaaacttaatagcaattaagaaatggctaaatatagccttcatacatggggaggtcttactgcaacttgatatgccatgttttattgatactcataggagtattctggatctcccatcgtttcctggatggaaacagaagataaggggattgggaggttggagggggtggaggagagggactctgaggtgagggtgtgagggaggctgcagctgggatataaaatcaatacataaattgttttaaaagtgctaaattattttttaattagttacttctgtgtatagatgttttatctgcatgcatgtctgtgcactacatgtgtgccttgtgccaggaaagccagagtagagtgtcagatcccctggaactgtagctacagtcagctgtgagctgttatgtgggtgctgggaattgaacccaggtcttctggaagagaagccagtgttcctaacctctgagccatctctgcagtcttgaaagagttaagttcttattactactattagtactaggaaatgtcaactcagaatctcagatagagaaaaaaatttgcttcaggttttgtttgagggcttttctgtttgtctacctacctgctacacccaatacatacatacatacatacatacatacatacatacatacatacatacacatacattcatacatacacatacacatatatctctctgagctttaattgtgctcatcagtttcctttatgcctcaatgcatgacaggactattttaatatatcaatttaaacataaactatattgcttaaatgagtgcattgtcgaatacacacaatgatgtcgaacagtagctacatttatttttaaagttatgattctcatatgttccaatattccaataaatttcaaccctcacttcaaaattgagtcccattatcccacctgctcaaaagtgttcacagggttgcctggctgccatgtaagataaccttccacctcccttgacaccactgggatagggcacaatgacccaccataagccctggttattagcttcaaatacacagcgcatactgtagctcacagcaagcatctgtgtacagaaattctactaacacttcagatactcaaaaccttccttaaaataacattcacctaccagacaaagcatttaaataagtaaaaattaaaatggttcatttccttcctgccacaactgtacagaaagtcatacttatgtgtgtgtgtgtatgtgtgcgcctttcaacagttttattacacacacacacacacacacacacacacacaagagaatgcaaggaagtgtcttgtccttgtggattcatttgtatagtctgttatgtaaagggcaggatttagaaaacaaaagtgacagtcaatagttttctagggagaggttggtacatgtggaactttttttcatatatatatgaaaaaaaatatatatatataatatatatatatatatatatattatatatatatataatttggttgtagaagaggacagagtgctacaatgagggtaatgggatgaagcacacatcttaggacataacaaattattaagataactttttgaatctaattctttgtgtacattaaatactattttatccaacaatctaaggtaactggggagattttcatgtgcttaggttaaaattatttttatatttgagaatcacatgaccaataacaacacttcagcagccaatgttattttgcatgcattttaagtaagacattacatcatcatctgctctcactcacattttatgctgtatcatgcattattcccctagtgttcttcaaactgtcttgtaaggcagccaacttgttacttccctacaagggcaatggtgtcgtgtggaatcttaaatcaaggagaaaaggttacagctggtctcgatacttaaaatatggtttctaagaatctcaaggacacactcaaagcaattcataaggaaaatacagatggtttctgcacttttaagttagtatacatttagcaaagaaaacaattaaaaatagtaccctctgtgggatgctctactgaaacaaacatcaattttgtgatgcaggccagtctggaaacgtgtactgtcacagtacactaaactttccataactaaaacatacaactttggcctgagaggggacagggaaggccacaaggacagacatacacgtgcaacggactcttcaagatctaaatgagggaatgggtgagttatcagagaagccaagtttagtgactggatggtggaatcatggctttggtatattacatacctaacgaatccaaagggaaaaatcctaatataacttgtatctttttttttctattttaaatttttttacatttcattttacattccaaccacagctcttccctcctcccactgccccagccctccccgactccacgctgcctcacaggtaagggctctcacgaggagtcaacatagtctggctcattaggttggggcagggcccagcccctcttccatgcatcaagacggagcgtggcactccatcatagggaaggggctccaccaagccagctcaggtagcggcttatatggtggtcctactgcgtctgagcatggcatgccaccctaaggaatgggctgcaacataacttgtgaatgttatcaccttacagccaatgtctatttcaaggaattcaaagcaattccatccgagcagtggtccaagctctgcaacagcagccgcgatggcatatgcaccaacagttcaaccaaatgaggagatgctgtgcatttcacgagcctgggtcctccagtgtaaagcggcttcacagcaggtgtgggctatgaagcctgctgacaggacacagctctactcctccacccggcagctctcctgtccctcagctgtaaaatgggggtggcgtctgtgccggccgcccatttgtgagtggtcattgcattgcttcccagtctaatgtagacattatctggatgggaagaggagacaatcagtgttaaggaagataaagggcaaccgaatgaatgggacggcaagcgatcacagtgacatcagaggtgagtgtagtggcaccagcggtggccagctctgaaaaaatactgatgaacatatgagaaatgcaggcacatatttactttacaaaacactaattttgttgtcggtttttttttttttatttttttattttttgagacagggtttctttgtgtagccttagctgtcctggaactcactttgtgagccaggctggcctcgaactcacagagattcacctgcctcttcctcccaaatgctgggattaaaaggtctgtgtgtgccaccactgccaatctacacattaattttaatgaacttttgctttataattaacatcttgcaccgcccagtctgaaccagaaaacctaccaatttccacgaacatactattactgacaatactggctcatgattcggatgctttccaattagtggaaaggtcaccagcttaaataaaacaagagtgtcttatctacctcactggtctctgagcttcgtgttttacagctactcttttcttggccaataattaaggtctgaaagaaacctgcagacaagctgggcattggctggagtaacaagagtgcaccttcttctgatgcactgtgtcctgcctggtatcatacaataacaagttttgtagtctggagtataagttcagcagtgctggctctctccactctgacttcctgcagttgagcttttcttacattatttatcagactgcctcgcgtgagaatcacatttatgtttatttccttacaataatggctattttttcaagaggaatgtctaatttgccctttaatggtcatcaggatttaatatatttgtctacattgaaccatgtcctaaatcctagagggatgattaaatataatttatatcataatataaataaggcacccagcattctgagatggtcccagggttcagtagccactcaggtgattcacaacagtttaaatgcgacagctgtgtatcttagacatgctgtctagtagccatctgtacaatttcaaacattcaaacttcaatctcataaaatcataaaaatatacattaggaagtatgcgagaataaacccagtaaatgaatttaccatttgttttaaagtattcataaattttaaaatacaagaagtaaaagagataccatagccttttaggataaattcctaaacactttcatatgtaagttggtaaaagttatagagaaaaaaagaatacagaggagagactgctgaatgatctttctagacagcatactgcctaaaagaatccacagacaaacgatgccatcaagcatgggtataaactgcatgtgtgatgggttgtcaaaagctccaaatctattgcagcagaagccactcctaagagagtcgtatcggtgaagcaccgcacagctaagaacctgggcagctccggctagctcctgcatcttgcaatcagtatcaactgctggctccaggaacattaaaccaaacttgggactctcaaacagcttctgtcatagtttgtctgaaatactgacacagtgtctacgaaacctcactctgctgggctgggaacacacacagaatgccaagtagcccagtgagctacgggcacctccaagttcagaaacactgttcagctgtcttctgacattcctgggcctaacctggcatgtacttagtgacaaagccactattactgatttgtacaaagactgagcacattctagatggcacattttcatcaatgaagcttacataggttacaatcactcacactaagactctgctgcccagcaaacagaagagcaccgattttagtgtagaaacgtggggttcactgtgatgggtagttgtgaatatcaacctgagcagactggaagctacctagataatgagtgaattactattcctaaggaagccagcatcaagaggataatcgctgtcaaggctgtttcataaaccttgaaaaggctgtggtctaaggggtaaacagaggttagaaggcttttgagaaccatcttagaaatggcagtgctaggaagatgtatcagcaggtaaaggcacactctgcaagcaagagacctcagtttggatgccggcatccatgcaagcctgggtgcagcgctgtgtacatctataaccccagggctgggggcaaggtgacattctaccaagcagtactcagttctcaaatcacaatccaatgccacaatttgaagatattgtcaacccattaagtactagattcattactaaaagtcacccatcttattgttgaccagggccttaagtgcccatgttccattcaatttgaatcgcagtcatatcccatattcaaaatgaaattctcttctgtgttacttgtgtttgagtttctgagacgtggtcttgaattcatggtgattctcctgcttcactcttttgaagatgtacacgaatcaacatgctcgtttccggttttgattctttatttttatttatttcttaagaaaaagtcttgctattaccttctctaggctggccttgaacctggaacctctctgtctcaattctccagtgctaggattacctgtctctgtgccaagactgaactgttttaaactccccctttgatgtattaaacaatgaccagttttgtttatatttttaaataggatatctaaaaagaataaaagatgttggcacattctgcacccaacaccacctggactaagcaacaattctctctaatgtgggtccttttgtgtattatactatttgatttattgcatcattaactgtaaggtaacagcttatattcagtttaggggacagcagatgtctgcaactatcacaaaactaaacttgacgaaacgtgactggtcttggtaaagactttaaagcagactcatgctttgccaccacatttgggctttcttgttactccactcacgtccatccccttatccacacctaagtgacagcagagccggttcccaatgctgtctgatggcgatgctacttactactcactcagctcttaggaaaatgccagcaaatagagagtcctcaacagacgctggtgcattgggtaccattttctattactctgataaaacaccatgacaaaggcaaaggtttccttgggcttatggttctgggggttagatcccatgatggtagaaagtggcgggcatggcggcaggaacaaaccctgagaactcacatcagtggcataagcacaaagtagagagagcgactggaaatgccaagtctttaaggtctcagagcccagagaataaggccacaccccccaagcctccccattcagctgccacactagggccagtgttcaaatgtctgagactgggggacacctcatccaaaacacccagctaggattagaaggagcaggcctagcttttgtggccccaatttgctttgccaactagcttgacacttcaattctgacctaatggctaggctgacaccttgctaggtttgagttctaatcacttgatttaaactcttccacatcagatgttatctcagtgtcaagtagctactgctcagctccagtcaggtcagggactggggagtgagttatgactttcttagagtttaagttaaagacagatgtcaagactgttcaaaaggattcccccctctacccccatcccccccccacacacagagaaaatacctattgtatttattgaatgggcccatggacagacaactgacttggattgtaggtggggactcagcagacaagaactggaagtaaatgccaatgaaaggggagtaaccagcctagcacgaactccactgctccactggccaactgacgcggcttccaaagcttctgtttgagttttactccttactttacccaccccgcttctccccagtcacttctttcatcccacattctccgttccttgagtgctttgaatgcaaactcagcagaactgggttcagctaataatttgattccttaaagtattagcaaaatttcaaagtgatatgtttatcgctgtgtatagagaaagctctctcatttaccatggatattgagttcttgttcaaagcaagcttaaaatactcttctgggtgtgtgtgtatgtgtgtgtgattgttcatgtgtatggatatacgtttatggcacccagttttcaggagtcatctttgagtttttgaggtagggtctctcactgggtctgtgacttgcctatgaagctcagttggctagtcagcaagtgtctagggctctgttgagatcacaagcccagcttttcacagaggtgctggagactgaacctggaacctcattcttagacaaccaaaactttaccaacggagctatgtccctggaccctcaacatatactgaaaacaaaatgaaagaatctatcagggagtaagacatgattacaaacttccttgtctcttccactggaaacttagccttccatccctcgccccacaaaacactgcaaagtgccctggtgccccagcttcagccatcatcaactcattaaccagtcttatgaggacagtgcactcttctctcacacatctctactaacctttctgtctcttccacccaaacaaggttatcacagtcccgctcacatcagattttttgctttacgttttaatttaagaattaatttctgtttatttagttttcagtattggtcagctttgttctagcctcacatgtaaagaaaatttgtgaatcatctaagttactacacagtgggaagaaaacagtaaattcttttgtatgcaatgaagcagtccctcgttttttataatttattcttttcattttgttgtgatgggagccttgctgtttccctggctggccccaactcctgagcttgagtaattttccagctttggcttcatgaacagctgggatgagaggatagcaactgacacagcttgggtgacaccgctgtggctcttgcagagcaagtgggcagcccagctgtgagaggcatcccatgtggtagtgtcacccgaacaacaccctcactggacctaatgtgacctcagtgtcaccccagaaaacatcctcactgtacttaatgggacctcagtgtcaccccaacaccaccctcactggacctaatgtgacctcagtgtcaccccaacaacaccctcactggacctaatgtgacctcagtgtcaccccaacaacaccctcactggacctaatgggacctcagtgtcacccctaacagcaccctcactgtacctaatgtgacctcagtgtcaccccaacaacaccctcactggacctaatgggacctcagtgtcaccccaacaacaccctcactggacctaatgggacctcagtgtcaccccaacaacacccgcactgtacctaatgtgacctcagtgtcaccccagcaacaccctcactgtacctaatgggacctcagtgtcaccccaacaacaccctcactggacctaatgggacctcagtgtcaccccaacaacaccctcacagtacctaatgtgacctcagtgtcaccccaacaacaccctcactggacctaatgatgtgacctcagtgtcaccccaacaacaccctcactggacctaatgtgacctcagtgtcacccctaacaacaccctcactggacctaatgtgacctcagtgtcactccagaaaacaccctcacagtacctaatgtgacctcagtgtcaccccagcaacaccctcattgtacctaatgtgacgtcagtgtcacccctaacaacaccctcacagtaactaatgtgacctcagtgtcaccccagcaaacaccctcattgtacctaatgtgacctcagtgtcaccccaacaacaccctcactggacctaatgtgacctcagtttcacgccaacaacaccctcactggacctaatgtgacctcagtgtcaccccagcaaacaccctcactggacctaatgtgacctcagtgtcaccccagcaacaccctcactggacctaatgggacctcagtgtcaccccaacaacacccaacatcctcactgtacctaatgtaacctcagtgtcaccccaggaaacatcctcacagtacctaatgtgacctcagtgtcaccccaacaacaccctcactggacctaatgatgtgacctcagtgtcaccccaacaacaccctcactggacctaatgtgacctcagtgtcacccctaacagcaccctcactggacctaatgtgacctcagtgtcacccctaacaacaccctcactggacctaatgtgacctcagtgtcacccctaacagcaccctcactgtacctaatgtgacctcagtgccacctcaacaacaccctcacagtacctaatgtgacctcagtgtcacccaataacaccctcactggacctaatgtgacctcagtgtcaccccaacaacaccctcccagtacctaatgtgacctcagtgtcacccctaacagcaccctcactgtacctaatgtgacctcagtgtcaccccaacaacaccctcactggacctaatgggacctcagtgtcaccccaacaacacactcactggacctaatgggacctcagtgtcaccccaacaacaccctcactggacctaatgtgacttcagtgtcaccacagcaaacaccctcactggacctaatgtgacctcagtgtcaccccagcaaacaccctcactggacctaatgtgacctcagtgtcaccccagaaaacatcctcacagtacctaatgtgacctcagtgtcaccccagcaacaccctcattgtaccaatgtgacctcagtgtcacccctaacaacaccctcacagtaactaatgtgacctcagtgtcaccccagcaaacaccctcattgtacctaatgtgacctcagtgtcaccccaacaacaccctcactggacctaatgtgacctcagtgtcacccctaacagcaccctcactggacctaatgtgacctcagtgtcacccctaacaacaccctcactggacctaatgtgacctcagtgtcacccctaacagcaccctcactgtacctaatgtgacctcagtgccaccccagcaaacaccctcactggacctaatgatgtgacctcagtgtcaccccaacaacaccctcactggacctaatgatgtgacctcagtgtcaccccaacaacaccctcactggacctaatgggacctcagtgtcaccccaacaaaaccttactgtacctaatgtgacctcagtgtcaccccaacaacaccctcactggacgtaatgtgacctcagtgtcacccctaacagcaccctccctgtacctaatgtgacctcagtgtcaccccaacaccactctcactggacctaatgggacctcagtgtcaccccaacaacaccctcactgtacctaatgtgacctcagtgtcaccccagcaacaccctcactggacctaatgtgacctcagtgtcaccccagcaaacatcctcacagtccttatgatgtgacctcattgtcaccccagaaaacatcctcattgtgcctaatgtgacatcagtgtcaccccagcaacaccctcactgtacctaatgtgacctcagtgtcaccccagcaacactcgcagtgtacctaatgtgtcctcagtgtcaccccaacaacaccctcactggacctaatgggacctcagtgtcacccctaacaacaccctcactgtacctaatgtgacctcagtgtcaccccagcaacaccctcactggacctaatgtgacctcagtgtcaccccagcaaacatcctcacagtccttatgatgtgacctcattgtcaccccagaaaacatcctcattgtacctaatgtgacctcagtgtcaccccaacaacaccctcactggacctactgatgtgacctcagtgtcaccccaacaacacccttactggagctaatgtgatctcagtgtcaccccagcaacaccctcactggacctaatgtgacctcagtgtcaccactaacaacaccctcacagtaactaatgtgacctcagtgtcaccccaacaacaccctcacagtacctaatgtgacctcagtgtcaccccagcaacaccctcactgtacctaatgtgacctcagtgtcacccctaacaacaccctcacagtacctaatgtgacctcagtgtcaccccagcaacaccctcactgtacctaatgtgacctcagtgtcacccctaacaacaccctcacagtaactaatgtgacctcagtgtcaccccaacaacaccctcactggacctaatgtgacctcagtgtcacccaaaaacaccctcactggagctaatgtgacctcaatgtcaccccaacaacaccctcactggacctcatgtgacctcagtgtcaccccaacaacaccctcactggacctaatgatgtgacctcagtgtcaccccagcaaacagtacttcacaggtactgtgttgacctcacaggctttctgtagggcttcaaaagcaaactgcacacatgctggtgcacacatggatatcccctcaaagcctctgtgctggggttgtcacggtcttcctccaagttcactagcattgccctctcaggcttccttctgggctcgcagcacctctgctactttccatgtgtccaagcatgacagtaaattcctgatttcttccctggagcagtctccctttacaccagaccacatttttctttgacttctttggaacctagttgtgattagggtgaacactacatgattttgatgttacctgcctactttctactatggggaaggttttacccaggtggtaactactattagtaaacaaaatccttaataactatagttcataaaaatcaagaggtcatttttaatcatcagacctcaatttttaaatgtcaataaaaagaaaaaaacccagcatttttctagactattttgtcacaagcatcctatcacgtcatgagttgaagattatttccatagagattagaaatgaaaggatccctttgtcttattccttttctctgcaaccctcacctctttatgatcccagcactgacaaacacatcgcggattatgtaggtatctactctgctttgccatgggacttgcttcaattaattttttctaccaaggttctttaagacgatgtctgtacacagtaggcattggaaatatttgttgagttgaagttaattagcttaggagagctgagatggacaaagtctataaaaggctacttcctcacaggtactcattctctctttgtaaaaacctgactctcccactacttacctgatgctgctcaagaattaaaacaatcaagcttttatgttaaggatggtggaatgaaagagtctaattcatcaaagtacatcaaggcacagtgcctgtttaaactaagtaagaaaaggtgaaatatttcatctggtaactatatcctccagtaatccaataatttagataatattgagaaattcatattgacaatgctgcagagattccttccttcaaggatttcttgctgtcaatcaatttttgtcaatttcaaagaaattaagcagcttcttttacagatttctaagtagattttactgacatgcaggctacactattcagggttacaaacggttatctttcaactgcagacactggatctttccagactgcatgccaatgatgcacatacaaaacctttacctcagccccaccttcctgtaggaaaacaaactgatttttgcttcacatgagttcatgcagaagtctgatcttttgtttctttttcttctgtttttaaaaatttcttagaaatcaagatgccctgcaagaacagttgtttaagaacctggaaggagcttctaaaaatcacccctgctttttattgattctaaagtgagaaccaaagtggaacacagagagagctcatgacaaacaagctggagatgccgtctcaacactttgtgacatccatttgcagttccatccatgtcacgtagggtgtgcaaactcacacaccatgggttaatgttactaaaatgatgccatgtggttgactttaagttattttagttgcagaattgaattttatcagctctacaaactgctcagtcctgtttgtagaatcactaatggtctgaaaaggaatggtgaatgccaccaagggctccatgtacaatcaccaaatcagagtatggattcccaacacccacatacaaagccagttgtggaggtgcacacctgcaaccctagtgctgggaaggagacaggagaagcctggagctcactgagcagccttccacaatgagtgagttccagctccagtgagaagcaaattctcaaaaaaaaaaaaaaataaggtagagaacagtagaagacatgtgatattaacctctgacttctgcatgcatgcacaaactctcaccacagacaatctgaagggtcaaatggttttagttacactttatagaatctaagggaggaaaataatatgctctgttatatttttctagtttaagatacacacaggtcacagggcagatgacttttagaagtcaagggtttactgcaattgtttcccttctgcctactgaatcttagcaaatggcaaacagtccttgcctctccatggctagaactggagggttaattaatcaccacgaagaacatagagctgaaccctagtattgagatggatataaatcttaagccagaatgttttccccaacactccaactataggctcttgaggctactctgggcctagttatgtccatcattgctacagtcagcagggttgagtcctacctgcatggttaaagatgctctacacaatcaaagactgtcatcattgttccctttgtccagtcactctatagcactatgattatcgagggaaggcaggaaggtacattaatgtggacaagatttgtaatttgggggtaggagtatactgcatgagattaaattctggattttgtgtgtccacaactcaacagttaattaactccataattctgtacatcaaagtactgctacaaatggtttcttagtaaagcaaaaagtaaaaccatggaagtgtgagttagggtgaatgttaacttcaggatggggagcacgtcagtatcttctaagcacggggtttccctgtgaggaataggtgtctattttagtaataaagagtcctaactttaaatccaggaattcattgtatgattaaaacagtgcatgtctgctgaatttactaacaggagatcctatcaagaagactgaaatggaccaagtactttgcgtttgaaaagggcaatggccacagtgttcccctggtactacacaacggcaggtcaaacttttgttcctcttgtcctacaaacaattttcaagcccacgctcaataaataaatttggtctcagcactcccaatcagtgcagcacaatcccctcagtagcagacctatgataaatggacttattttcccaaatcaaacacttgaatttaaattcagatgagttaatgcaaaggtcaacattgtaatcagttcttttgatctttatagaatttctggagtaatacataataaatctgaaacaaggcaatttgcagctctgtatgtgtggctggcaataaaaatcttagggatcagggcctttatgtacttagggaaggctttattggtgcagtcatggcgagggcttcaggccggggaacaatggcagcagatgaagcccaaaggcttgacttcatgactgctttacaatttatttacatatgtgtttatgtaaaacccaaatgaatatacatctctgcttactgtatctctgaactacttactcagtacttagaatcacttggtttcgagtatatatatgttgggtaaaaattgctgagaataaaaaattagcatatcaatttcaaccaaagattttttttttcaaaatctccattagaattaaattgtttagagtttgttttggttttgtgtttttacatttgagtttggagacgttgagtgactctaagatgacatgatgatccttagtaacccttacaatagatgaggagagcgtgattctgaggcaatcacaaagcaactctaatagccttcgcactgaaatttaagaaaaggaagaaagggaagtgggaggagggacgggaacacagaggaacaggaagtaggccgggcagggctgagcgcggtctgcacagtggctactgggtgctgctctgtagtcagaagacagggcgatggcagcagggcaccagtgtcagcaacagagcacatgggaaaaggtgagagcactgaggatgtcactgcctctatcttttccccctcctccctccctccctcccttccctcccttcctccctcctcctccctcccttcctccctccctccctccctttaaaagcctaccaaagcctctgctttgaacaagacaggaagtgatgattgttgttgtcatcaacaaagcacacagtgtccacaaaacatcttgtttctaaggggacccattctgactctgctccatgagaaacattgaaactgtcctgggacagactgaacaagcccagcattcaaagtgcacctttagatgaaaataaaaacgctgcagatttctaggaggcaagaaatctacacagcgggacagctgtcttccttggacagtgcagctgaagggaaaatgaattttaaagtctccaaagtatcataccatgcctgtggcttcacattctcttcagatgagtcccaagggtaagtgccccactcgaccaatgttcctggttgcactaaaaaggcctccataaagaattactggaacctcggcttgtgaggatagaacaaaggtatctgaacctgagagcagtgctttctgtgtatgtcagatgtgacacacatgcaacctgacagaaaccccgtgtgtatcagtcagggtcagcacaaagaactggcctacagtctctctactaagttcttcccttggtaggtgatgctctcaacaaatgttctactcaaatggccatgagtatgaatgtctgctcttactaagacaagtcagcaatgtctgaaggtttccctgcagcttcaaattttgtgtgtgcagctgtcctgtcacacatttaaaaggtacagtcttgtgagtcactaggggtctgacaagtggagttcgataattacaagtttgataattacagaaagtccttgatttaggaaagatcatttcattttttttaaagcaagtttctacaacttagtgtacataaaggaaaagaacagtccgagtgtagcttctacagtccattcaactataggagggctgaaaattggcaattcttaatgcacaaatacagaggaaattttattcccttctcggttcatgtagatcaatatatttattatctactatgtataaacaatgggttggatagtgtgtgctacatcacataataacatcagttgcaagtttacaacacaaagcctgcaggtaaaagacacagcagaacatacaagcttaatctgaggaaaaggaaaggggaagctatgtatttataataatctcaaaaaagaaagaaatcatttagaaatgatgaaagaaccttcctctgggtaaaacctcctcagtggagtatgtgggctacagaggacgggagagagggtcaagactacagtgcaaggtaagcggtctggataggaactgactatggctgggtgacggcaactcttcttcctcttggtgatggacagggaccctgacttttgccacaggaaaggtgtgaggtgctttgatgcttcttccatttctctggcctactcctcaccattcctggtactccagtccatcacaaacatggcatttagtccaaggctgtgaatgggatcggctcaacctctgatctgcagagctggtccaactatgcaacctaattatatggtgagtgtgatgaggaccttggatggatggctggcaagcttgcctaggagagggacgattcatttctaagagactattacacagacagttgatgtctctatatatcttcccttaagagtctcaaagaagggaaatcacctaagtgagacaagaggagggtgaaagctgttcctgccgctaacagagggaatgtcaggagagtaacacaagcaagcagaaatccaaagcaggaccgctaggataacagtctcctcttacaggctggcatcaaactgttgtaccacacagatagaaacccaggctctctagaaggagctggtctgagaggtgggacaggtggagaagctgaaatcaaggacacatgtttggcaaattttggagggcaagggcatagagccagtgatcagtgtgggaccagagatcacaggaagaattcactacaggtcacatagattccatgctgctgttagaatctttacaagacaagccaaagcttcgtaacaaagcagccaaaaacaaatgggagaggttttgcatgtaaaaggtgaatataaaaacagaaggtgcaagtcctagaatagcgcaagccagtggctttcctacagccatggagggcatgagcagctcctacaaatgcaatatgaagccagtggctggatgggcacttttaaggattaagtcttagaagaaatcttgtagtacattttcttggctgaatcttctaggatataccatgccccgagaaaaccttctgcagtaggcaatggctaatgatactgaaagggcccttcctcctctgagagtgtttcctcaccctccagacaggctgactctcctgaattccacatggagctgagtgaggtctacaagtgggcatctggaagactggaccgatctcctagaaaccaagtggcaactatcagacgacagaagataaccagtctcaggcagaggacaaagaagtcacacttagactagcagtaagaaaaccttaattataaaagagaatccaccaagatcccaagcacacattctattttatcccagttgggcatctcagggcttattaaaggtggctgaggtatagacagtgaaaagcatctacctgaaacaagatgtcttggagctgttggtatgaatcgtaattgtatctactttttctcgaaggggctactttcaaaactagtatttctgactcaaaagaaacaataaatctggcagagatgcctagcaagcagggataacagtggacagcacattgaggtgttctccactccagaaaaagctccagcagtggacaaacagagccaaagccatttgtgagactctgggcagatgactagctttctgacgacagcaagatctggattccctgctgcagcccatgctggcactcagtagggtcaggctctgcacatccaagtgcaactacttctgccctagaagagaagatgaaaactacagtccagccttcacagactatctgaacacctggtctgatgcagcagctcctgtctaagattcacttttgagcacagtccattggctgcggtctatgtagttttccctgtcatccatctatggcactgggacctttcagttacaagaacaagtcaaggaattatgatgccaaagtgaggctttcttaatgactcctatatagagaaaattagaacggcataaagtaagcagttttataaactaaagcaccaagtaaggagacattgtttcacacataagcatcatactgcacatgtatgctgactatgtggattgtgttaagctgacacttgtgatattctaacaccaatactctctctcattcaataaccttccgggcagtgggctagacaatgggagatgtgctgtgggatgcacgcacgccagctcttatgttctcacctgtgagaggaagagtccctcactagtgtgtttttacatcacaaagaacggaatgattgcatttgctgcaaacaccaaggcacctgctttgctcagtctatacaaaatcagagcgatatcaacagttaaaagaataatctgaatatttacagagattacacaaaggattcaatcatttgcatctaatacaagcctgtgagacttttttttgcccggactgagagacacctcagtctgatggcagtactccttttttcctgaaaacccaagaaaatcaccgtaagagtgaacacctgcttaaccacagccaggtgcagtcagccctccttgtactagctgactgcacattcctcccaccagacttctccaaaagtaactagtggcttcttttccaaatactgaattttctgctaggccccaaattccattcatgaggctcttatccatggctacagtcacagtgtttcagttcagttacagaaccgttgcgctaagcatctactatggtctaggcaccatcctgagattaatttaacttatctccactagtgagcaaatataactgatgagataaatgagatttttcagtttaactgtaaattcaaatagctctttaagttgcagaatttcctaccatatgaacacactcaagtatcagaaaacatatcttaggattgttgcttaatatctaaaatctgaagaattaaaattgtaagcgcttctgctggatgaaatatttttcagaaaaatcccatgtgtctagaaagaccaatactcagggaaaatctttatctcagagtgtcttccctctcaacccttgaccttaagatagaaatgaatggttctattcgtgtgagtggactaacagatgagcatccaaaagagatacttagtgattggcatctctactcattccaatactaacatgactgcccattcctcactcaacaggtatctgtgggttggcaaaaggcttgcctaggacacacgggtgaggccccggtttactccctcataccacacacaaaagcaccaacaccaaaaccaccatccaaaatgaattcacaaccagcaaggaatctacaagtcaccccatcttaggcaaagtcatagtagtgagaaacaacaaagaaaaatttgaagactgaactgattagctcttcaacagaagtgctctgcaaggaatgccatgtagccatctttgttttcatttcctgttccccaaatggcactttcacaggagttccatccctctaaatattacatgttcctcttcaggccctcacgataccctgggacagcaggcatctgtgcttctatggcagagaaacaaggatccttggctcataagctactgcaggtgtctgatctcgcttaggtctggtgcctcaaaggttaatacctcttttcacaggcccaaaggaggagtatgcacagtgacatttacagacacccaggctacagtgcagaaacccaatataatggaaagcttactattcaccccttcaccaggtatttacagatgccttttcagttctgtgtcctagtttaaccctggagacatggtgctgaacaaaacagctattacactcagcaccgctcctcctatggggagacacggactataaacataaaacttgggcagtgttaagcacagcctggtgctctgttaacatcatcagtggaactcttcatccacacccaaattttctgatggtttgcaaaattactttgaaaaactatgtaaacgaaactaaataaaaaacttaatagttgttccaataacggaaacccacagtaaatttgttctgaaacatgaaggagcgtcatatttgtaacaattttgaagtgatttttaatttccactacccagtcaaaaattactatctgagccgggcgttggtggcgcacgcctttaatcccagcactcgggaggcagaggcaggtggatctctgtgagttcgagaccagcctggtctacaagagctagttccaggacagcctccaaagccacagagaaaccctgtctcgaaaaaccaaaaaaaaaaaaaaaaaaaaaaaaaaaaaaaaattactatctgctttatctaactgcacacatgtttaataacaataacatatctatattgtgtatatctgttgtggttatgtgttactaatgtaattatctgaatatatgtaggaggcagaaagacatgggataattaagatgtaattacatgattagcaggtatagctacatcacacaatcacacactttacagaaaatttctgcttacagatacacagattagattatacatctgtataatgattcgtaacttgaaatcaaaaccactctagaaactttacgttaattaagaacataagacattttcagaaaccatcaatgaacaagagaggcatggagcaaccaagaggacaaacatggtaaagtcagagacaagacaggctgggaggtcagtccctgtgggtgtgcttgacagcacagaatctccagagtccctcatctcacacttggggtcaggtgtagatagactttctctccaaatcaggttgatgaaaacaacagcatcacttggtcacttgctagaaatgtaaattccagcaccctagcccacaaccagggagttctacaaaatgaagcagcgaagtccctaggatgaagctgttttacaatgggtaacaagggtttggaggggatggataaccagcataaagtcaaacagctattagttaaaacggcacgcttgcaaaaatgaaccatcgagggcatggattatcacttgtttcgtttaacttgttcccagaaagtaatccacatcactaaagatcaagagctctgctaagaaataaagataaaatcctaagtaatacctctctgtaacagacccaaaagcagtgactgagttgtgaaatgccctgaaagatgctcgggtcagtctcccggagccaatctggtgtgtgacgagaaccttgcctgatttgtactggctgctgcaggacatgccactgaagcagaggctcacacaaggagactctagctactgttcactggattcctgaaacaggttcatgtgttattcaaacttcattcccatcagatttaattcggtaactcttctagctaaaggtctatacggcctaatgcaaatctcaggctggtgtacctgctccataggcagtggaagtgatggctggagccacaggagggcagaaagagaagagtctgggctcagctgagaattggggctggacagtgatgaaaagtccatatgttacagtgccaccataaattacactggaaagaatggtcaggccacaaaggggttccaaaaataggctgaaactgctcacagtctgaaaacaaattgcttaagttccaatatgagcaaacactgttcttgacatgtattttcatgtggtcactactgggtgaaaccaggtctacagagatgaaatacaatatgctctggcattggaactggaagttgttattccatctagacactaaaatgcagagaaatctgcatgagtctggtgcctcaaggcctaaagatttattatgagggaaagacaaagtgaacgatggtgtgtcagatggcctgaactctgaaagtgaacctgcattttcaggaaacggaaacctcgggagccttaccttttcatcatatcggaggcctgagtctgaattatgtactgattggtttatctaaaaaatatacttaatgataataacaggaacattataaatcaacaggcaaagtgcccaaagggttgcactaccaacaacaagttcatttttcttgaagacaaacataaaatcaaaaaatgctaagaaatgcctatataattgtttctcttacaagggagaaaataagcaaaaacgggtaataagcacatcctatgatgacgcacgtaaggcttataaagatggttatggtcaagagttatgaaacatgatcacttatgagttactaaatctgcaaaagtgcactataaaaagtcctaataacaaaaaagagtgaataattaaatggcttccttatataactattcaagcaaatagagtccatattttttaaactggtgtgcctctaagaccaataaatgcaagaatcatatactgtttattcttatcacaatgatagaacattgaaggatcaagaaaatatagctttaaattatatatttcttaattttcaattttttgacagaatggctctaggcaggaagaatatacatactgtatgcattaacacatgatatttagggaatgttatgtactttaaaactgaacttagcattctaaaataatttatgttctgtctaccatattattctgaaaattaaaaatggtaatttccattgcactgaagaaacaataaataatattcctatttgacaaaggaaatgcaaatgactcagaacacagatttcaacagtgattcatactggattaaaatcatgttctcctttgagaaattgcttgtcattaatggaaaatatcattagctcagttttctgaaacagaatggaattttcacacagctcaaaagtaactaaaatcttccaaacagtaagaatgggacattgaggtaagaagggagaaccaaccagtataaagccatattgtaccccagcatgaagtgatcagatacctgcctaaaatgatggacagctctggcctagtgaacaggccaaaaaaaaaaaaaaaaaaaaaaaaaatcccatttactctcgtccagatgggaccaactggacgcttcatcgcaaacaactcatccttcttcggaccttcctgtccagctcctgagcaagctgcggctggtaatgatggatatcaaggctacagtgaagtgggtgacaacaggagccttgttatagctgccagtctttctgtcttgtcattattacacattgaagatttatttgagtttattgttgtgcacagggtctagccatttgcaattcatcacctagtacagcaagttcacgatagtggccgaagctataattgccacgtccacctgcttctggaaattgtgaggtcactcacattgctgcgtccacctgctttggggaattatgaggtcactagcgagggcagctcagtacagcttctggatgagaaagaaaaccctttctttccttgcatctctggccctcacattaacaaggctactttcctggatatggattacattccatctctggtaaagcaaacactgagagattacagtcagacagtaagcactgcaacctccagagccagttacaatgggaactaatgttatagttcctactgtaaaggccagggccacaaagtatagaaaggagagcatgagaaacccactctaacaatcttccaatgtgcacaatttaaaccagtctgtcaaatattttcaaagtaggtgggctatacactatgtaaattgcagcatattaaaatatatgctttgataatacttaaagatagcaaaaatcaaatgtggagactggattttgctgtactcttaaggaaatccttacctattttggatttggatattacctactatgataaatgaaggaaaagaacaatcactaacatgatttattatttttaaacaccttttgttctatgtttactgtttttatttcttatttgcctgcaaaagaacagcaggggttttcaggtcttttgcttgaacaaccagctctcaagttttacagccaggctacagaaggtagtgtttataagatttccactctcctgaaagcacacggctcacctgccagtttgctcagtgtacagatggcttgagaatttatgatacctgagtgttttcctgcttgatattatggtattacttagttgttacatccttgctgctaatggatttctttctaaaaccaagatttactgagatagaattttttttccaggttctttgaaaagtctgtgtggcaagtagtgcagaaaatggtaagccaccatcataatctaatataaaatcccaactatttagaaaggttatctctgtattatcttatttcccaaacaacaatgataaccaacagtgtcacttcatgaggttatggcttaatcacagctctgggcgggaagtgtttctttgtgccacactgtggtatcccaccaactttgactacaaaatcagtactaatggacagtgggctccctctaggaacaccggatttgaaagctatatactatttcacttagatgtctggtcctattttaatagcactttgagcaacttcaggggaatagtgaaataaaaaggatttttaaaaaaggggcagggtgtgtgtctgcagtgcttatttccacgagataacatgcaacctaattaacttgggtgtcaccatacagagtgacaggggtgatgggatgcttttcttctccctactctctccctcctgtccactgtaacactggatgtgcaaaagcctgcagccccccaggctaacgggacaatagactaaagaatgacctacaatttcagaccagcgctagcaaaccaagcttacagtgcccagggagctcagcaacagagaagggccgcgcaggtccccgccctgcagagatctgtaactagcacccgtgtgtcatgcaagagcttcccaacttctttctcatgcacaatctcctcaggttataagataggcacagagttaactgtgtatctgcttcacagagagggaaacagaggctcagagaggggagaggtttgtctgtagccacatgagctgaagggtagagcaacccaagttggtgttctgagccacaccacaggcgagcacaggctggctagcatcttagaagtctttgactgactgtgtgagtgttgagtagattctggggttatgtaacaggttgattcacaccttttattttttgccaggcaagcttaactctggtctgtccaagtatgtatcaaaatcatactgtttactctcttgaattttttgactgtgaattggagtttacatgtttgaagctgtacgaaaatccagtttaagaactagaaagctaagccaatgtttagagttaacacattcagaactctgtctccattccctgtcaaatttacagctttcccctcctttctgggacaactactatcaggaaccatcatttatccagtctgtatttgttggtttttagcagttgtccataagatccattgctgacccctcagatgaaaactgtgcctatctctaagtgctaatgaatgagtaattgtacagcatgtgttattcctcatattttgttcttgaaaaactacagcttgagactcattaatgtgacgaatatggctgcagggctttgttttggcgagttttcttagtatttcaaagaacaaattcccctgctaattcacatccatgccaccttaggtaaagttctgtaaactacagtgatggactctaaggacagttttgcatatattccctagcacaaggttttccagggatgtgccttgtaggccatagtgaagcacgaggcctgtagtctcacaggctgctggacacacttccagaaacatttgaaggctctggttacccttatctggataacagcttatacattttgtttttaacttttggcaatctgatgagcaggacatggtgttccactgtcatttcaattccagtttcccaacttctaaccatgtcaaacatatttcacgttactagaccactatgctccctcatttgtaaagtgtctggtactgtctttaagtccccatctgtatttcctcttgtaaaatgtttctcccagtctgtagcttagtgtggtaatttaagaaaagcagcacttgagagaaagatgacatgagacagggttcaaacagagggattttttgtttgtttgtttttgttttttaaattaggaaaggaatcataaggaagggaaggggaaggggggagctggcctctggagacaggatcaacaggagagagaaagagggtgggggagagagagaagggtgggcggggcccttttaaagggagcatagtgaatgtgcacaggcggtgctgctcttagtggctgagggcgtatcctgtcagaaccccaaggacaggccagtacagatgtatgaataccaacattaaaacctttagtattcaaaaatgctaagttctttgtttgtttgcttgtttttcgagacagggtttctctgtgtagctttggagcctgtcctggcactcactctgtagaccaggctggcctccaactcacagagatccgcctgcctctgcctcccgagtgctgggattaaaggcgtgcgccactaccgccagccttaagttcttaattctaataaggtttcaagtatcaagctcttcatgtttgaatttctttttgtctcatcttaagattgtcctacttgcctttgatgttaatctacctacagtgtttattctaaagctttgccttttcgtttgtgtttaactcatttggcatcaattctttcaggtgctatgaggtacagattccaatttcatttccctcgtatggataactgattgttccttcacctttattaaaaagtgcatccttttcattctgattgggaatattaccttcatcatatgtcaggtgcactacctgagtggctgtgttttggatttcttgttcttttgctttaggcttctatccctcaaccaagtcatccattaacgtacctttcaatatattttgaaatcttaaaaacttcactgcatgatcttcataccataaaacaggccgaagtaaactttattaccatttactaagttaataaactgaagccttaagatcatttataacacgcttttgaattgcaatccgtatcttacaattctcaagtcattgattgttttctaacccctgactccccggagcactttcatgtcattgcatcgatcactcacttaacacaatgctaattatttataatggtttatattattatagaaagagtacaaatcttagagtcaaatgcacatacacaaaatggttaaaaacaaaattcaagaaagtctggctgctcagccttgaagaaatcattatcttctgaagatgaaattatcgcatttgttcagtactgataatcactgttgaaggatggccgtatgtaataaaggcaatataatttaatatttagcacctattaacactgaagtcatgtgaattttacaataaattccttaagaggaacatgaaacaaataaaataccaaattacttgttattgccatcaagtattctgcacatctaactaccataagtcaagaggtagccttagaagaccactgtcctatcgtcttattcctgtctttaaaaacgtatctgttagcttccctgcttatattttccacacttcatacagtaacaataaataagtcagggtcattgaccaaaccagacaaatctgaagattgcagtctgtgaatgcccaagccagggcctagcggacacctgaagaccctcttccttcagctgttgctggaaaaattcaaactgttcaccacctactaaacctctcccttcagactcagccttctcctttcgttaggtcactgcaccctccacaccttgaccacattactttgtatcctcgttgcctcagggaaaggagtaactgtaataacttatatggtcaaacagacaattctgtggtatcctttgttttcctttttttgtttttgtgtgtgaaacgggatctagccgtgtcgcccaggctaacctaaaaccactatcctcctgcctcagccttcaaagtgggaggacatttacttccaccatcactttgtaccaagtttttactccataacaaaggagtctcattacctgcatcacagtctgacaaacatacgttggctcaagggaatgtaagggtagaaagactgacggctggtcgggtgagagcagcaagcagcacaatctcaggagacctcaagcttgggtgagagagacagagggacaaggccaaggaagtggagggggcgttaccagtcccgtgtagtcgggggagacgaggctactcaggctcaggccttacagcaagtgagagacggcctgagaggaggcctgcacaaggagggatggaaaggtggacagaagtcctgaaaaacagctccacactgagctgcacgtcccaccaggccttactgggcaccatgtctgcctgcctgctcctcttctctttacacactgtatacagcagtcctcacattctctgcacagccagtgcattccacacgcactccctcgccccacgcacagccaggatgggtcacgccaccttcccatttgtaccgacagtgttccggctgaacactaccacgggtgtcaatgaatggcagtggaatgactttctataatacagaatatcaattcttggggttatttttccttctttgatcatcagaatctggcactcaaaaaaggtcacgaaatgctgaatgactaaaaaccgcgggtttcaatttctgcacaaaaccattttccaaatattagaaaaaaaaaaaaacctgccaacctgtgcacacacacacccccaacacacactttgtaaatcaagattgtgtgctatcaaacaaaacaggaggctatgtagaatgcaaacatttttgaatggggcagcaattatgaaccccagttttatatgctctctgttagagacctgcagtgctgacatctggggcagagaaccatctcctgcacgaacacggtatgagcaccccaggatgtccagcagcccctctgtcctgtttgaacagctgggaacaaatatctgtctcctttgttggagaaattgctaggggtaaaaagaccattgatttacagtgagcataattttccttgagtactgattctcattttcactttttctctaagacagctctgtttttaagatctttaaaagctggcattgcctatggtaagggcatttttatagcatagagaaaaaaaaggctcagtaagtctatacttcatttgatcaagacaggaaatgggatagaattaagctgtgagaattaaataatcagacgcacttgtaccttctcctcatccccaaagaacaccaagtacaaggaagagcatgaagctctgacactcctgggtaggcaaggtacagcttgctagtggcctcccttctgcaactgagccagagggtctccactggcaatggcaggctctgatggacaggagatgcccctccctctttgggaaatggttccactttgagtttattcagcagatgttagaattttgacacttctttaaccaggcacattgaagtttaacccaacgagacaaagatctgttctctataggaagctccacaggacagcaaatgtgctccaggagtcagcgtttacttccagcaattccaaacgaccccaaatgtgctctagcacctggggaggaaatgctcagcttagacacagacagcacggaaggaacactgctcatcctgcacccacatgcagaactaggcgtgctaagttcacaatcactcataaactgagctgaaaacaacagtgcaacttttgagccagtggaaattttcttagtaaacatcctgctcagaatctaagctgcatgagtcactatgaatagtgccaggctggacgcctactctcttgaccattccccggcactttctgctgggcccgaggcggttcaatgggacaaaggtgtagaatatccctttacattgtgaaaatgtatgctgctgtgaggggtttaataaagaggctgaatgaccaacagctgaagaggataaggttagatagaagagccaaactgagaatgctgggagacagggcggagtcagaggagtcacaagcccggtgtagaggaagcaggacatgtacaaaatgaggtaaccagcaatgagccctggggtagaacttaggtaagaaatacggattaatttaggttgtaaaagccagctggtaacaagcctaagcttttggccgagcatttataactagtatgagtctcagtgtgtttatttgggagttgctgctgagacagaaacttctgccttcattgaatacagctgggaaactgctatgtctgggacaaaggaaaggtcctgctctcaagaatatgaaaataactaagccaacagtcactagggggaggagaggcacaaacaaatgggaagcgcagctgtccactcactactcgtctactccaagtcggcggctctgcttctctcgttattaagctggagatggagacgtctgtgctgaaacacagctctgagtgtcactgattagcagagccatcctgaggagtttcctgagctccctgcactccatgttcctctcttgttggcaagagatgtcctggcacctagtgtacttgctctaaaaggaacgagaacacttgttactttaggagatgatgaggagagaccagctatgcctcttgctatttcaaccctgaataaactcagagccttaaagacactgcacaggtgacacatggagctcactgacaggacatgagcccggtacagacaaggccgtgggtttcatccttagtctacaaaacaaatcaaaatcaagaaaaatactataaaatacctggcactgtgctatctttattatgttagccatttgctgttcctgcagctgaggttaatggctgtcagagagctgctgctacctggccgtagggtttgtactgcatgctatcctgtgttacactccaaagaacctctgtttctctgatctgtattctcaagtctcagatcctcccccgatagggacaccttcctattattatgcttgttcaaaagtctacattggatcctctgcagaactacatccagctgaggagagcttctccctacatccagctgagagcttctccctacataacagccatttgcttgctgagtcatgggaccttgcaagcatacagccactatgacccttccccttgaggcaatgagctgtgtgcagcatctctgaaggagcatcacaaactacagacaaccacactgctcatcactcacctcctgggacacttagtccaagagtttcctgtgtgaaattctactgtctcctggaaggcaccaaaattcacgagaggtactagaaacagacacacccatctctgcaagacaccacgtgagaaagaaaagatttgcagtcgttttggacatccccacagaaggaatctaagtgtcaagtggactgacggcaatgaagtgtatttttccattgctttaattccgccattgtactttcagaaactaagcagcagaaaacaaataagttttgactgaataacaatataatattcttacaaaaatatgtttatctatggtgtacagaggtcagaagactagagagaaggtatgtgtaagttggctcatttagtcaggaggtggtggcaaacacctttaatctcaacagagacaggtggatctctgagttcaaagccagcctggtctacagagtgagttccacgacagccagggaaactctgtctcaaaaaacaacaacaacaacaaaaaaagaaggttaatttattcccaaataatttacaaatagtaagaattgcataagaagttttaaagtttcttcaatatgtcacttcacatgtgataaaaaccccccactttaaaaagggggtagtgttatttgcaaactgagcaagagacccggatgatggccacatctaatcggttgtcaccttgcagctcaattagccctcatgtaaaaacgaggcatgtaaggagaaatgaggttttgacattatctctgccagcaagataattacacagccttcatttaacagtagggcaacactactgtagcaacaaattaactcagctccatttgcaattcatggtgtgttttctcatttaacaccatttgtctttccccaagtgaatgtttccattagttttctgcagcacagcaaacactcagtgtgactccacacatcacatcactgaggcaagcttaccttccagcaacagaaaaagcaaattcagagtctgacacaatggcctacgttacttttttctatttcagtcacacgttttctccagtttatggcccaattagaataaactaaagtatctgcatgcaacaaccaaacacacaacattgccacctaccctatccactcccaagactcttgtcttttgcggaaagtcctagtttgtatagtttgaactcagtaagtgtgccaacagcccacatggaaggacaaaggctgctgcatggagcttctagaaatcaccctaagaagatgtgtctgcaattttacttattgtcttttataagtttatactcagaacttttgcttggcacagatttgaaagctgctctcctccctcaacactaggtaagaacgggaggggctcagaaggcagaaaggtagtgcttcaaatgaatatagaggtgtttctgaatgcagcaggaccttgaggaagggactcccgtcgtttgaaaacagaagtgactattctacaagaaattaaggaaattctcaaagacaaagtaaaacactgaccattgccaggagtttcttttcatttatcacagtcgtggataacgtgacagtggtggggaaatgcatgcttgtgccattctgagactttaagaataaaaggcacagatgcacatttcccacagctatactggcgaactgttactttacactgcgaccagcaggcatgttctcacggcacattagttttcttttcttctttttaaccattaagataacacagcaatttctccacattcccaggtgaagacaggttctgcaaatacatttaaagctcaaaaagcaataaataagagaaagttctatgcctttctgtgtgctcgaacctgtgtgatatggacaaaatgattctgaacaaaatgagatgaaagaaataatgcctggctagttcctccaaaaacatcattagcacaaacttggtgaacacagagtttgacttcactgacccttagttcagctaattcagcaacagagaaaggagggaatcagtggtctcaccatggacatccctgagctacaggcaggccctgtaccatcctcaggttgtctactgctgtcctaaggaggtatagttactattactacattataaacaaaatgacaactgtggcattatcagatttcttatacatagtccacagaaatcaatacttggatagaagttatgaataacatatgaatgtactccatggatacagttttacactctatgtaaatttaactcaaccatccaaataataagaaaatatttactctttggcttgcattcctttattactaatttacttagtcttgattactttgaaaatgaccgagaaaagcaggcactcaaaagcaacattaaattgatccttaaaagatgattatagaagttactatagaaaatgaattaaagcactgaagctccatccttgtgcataacactacagagcatgagatactatagtttattgatactgcaagagttctacttgcagcagaacacacaatttcctctaatgctactaaaacaattgttcctattggaaacatatggctaaaagatgagcttttagactcacaataatacagttattttcaagaaaaccattaaatactaaaaggatttttattgctatgaatgtacagctataaaactgaagcatcactcagcaaatacagctgttaattacacctagcatttgtttaagaatattggtctttcttccacaattcatgatcagcatcatcagtacactagtgctctgtttatctactataacgcttacgtcactgaaacagtgtatggaggtgcaagcatcacccctgagctggccctcgccatgaactacattgccctacattcaatttatgaacatgcccaactaaagcaggagcgatgcctacatgcaatgctgagcttgcctcacgctacatgtgttgacacactgactataaatttacatacatctcttggctttaaacatctaatagctacaatctttaacaaagcaattctactgatgtaacttatttaagaaaataactacatgcatgtgtcacgtgtcttggaaggaaagactgttccagagcaatcattatttacagcagtataaaaatgagctcctaaacacaaggaatattttattgctacatgataaagtgttatacaaccattagattatatgatgaacatattatctgatgttatctcaaaaagcaggaaaaaacgcatccatggaatgcactcattcatacaaaggctgtctttgtgtttgctgagcatcaatagagctctctctctctactacaggaatacagctgtgaacaaaacactaacaatctctgcctttgtgacacctaatttctagggaaggatggtacataatttctctctctctctctctttctctctctctcatgcgcgcgcacacacacacacacacacaccacatatatgtgcaccaaggtgaaggagagagaaagagtgaaaagaaggcaaagaagtaacataaaggggagtagggcaggcaactgtagttttaaagtcagcaaatgattctagcaggcaacgagtgagttacggtgtactcaatgaaagagaattgtaggaactaccaccagagcctggtgctactggggagaagaaagcaagaggagcagtggggcccggacctgggaggagtactagtgttggtcttgtcctgcaagctaatggaggactccctctactctgcactgctgaactggagagaaacgaggagactagtatttgaacttggtcactccagttgctgatttggaagcagactgtaacaaagcaaagacagagtcaaccactgcagtcaaattcaaaaggggacaaaatggcgctgaagaggaggtgaatctggaggtgactggaagggtctcacccaatagacttgatgatgagattcaccaatactgcaaattactagggcagcaagggggggctgagaaagatgctaaggttcacctcacacagaaagtcactcaggcacacaagaagagcactgccatgcctgggaaaaggcaacggtacaggaaggacagtggtcacgatctaacacaagactgctccaaatgacaaaagggagcagagtcacatctcagggcctatatgcttagttaacatgtttgattaaactaaaaatgttagaagcagattatttaaaaatgaataaagcaatggatgctttcattttcaagcaaattttatttagaagcaagaaagaaaataaccaatttttgtgacagatattttgataatggatcatataagcacatacttcaaaagaatacatgagtatacatgagatccagaatgagcaaaaaataccaggacagacagactcagaatgtcatgaagataacaggagactgtaaattcagataagggctgctgaaaagcttccaacagcaaaagagaataggaatctaagttattttggacaatgtgtaaagcaaaaaaaagcacaaaagagagaaaatatttgttatttgtggtaaattatttagtctttcagtttcatcagtaaatgtttgcacctatttgtcctgagaaggtattcaggtcaacaagacaacagttagaatgcacaagtcttccacaggaagaacctttgtgcctccccctgctcctatgtgctgccattcaaccctaacttctcctgcaagacactagagagtacatatattttattcaaatctgctcaaatctctgggctcatataaagactcagacacttcaactatcattgaggaagtgcattctcctctatatttatcagatgttaacagacattcaaaggaatagcccacaaagtcatgacttttaaaggagagcttagggccttagaggagtaaccattcctatggggagttaaaatgggttcaccaagattgagttctgagacaaaatgtcattcaaacccagcaggagggctacttacccctgaggagggggtaggacatggtgcttccaatcttcaggatggctgcactacagcagtgagaggatctgtggtgggctttagtcaggcaggaatctatccgtaagggagtcatcttgtatgcttgattcctaggcctctccaggctgagagaccccttttaaggcatcacaataagcaactacacagttgccctctttaatcacatgggaccacaccaggtgacagaaccaaccctacagaagcctggactgaatccactgttctgaaaagtgacacaggtcttaattcatgaatttatcaaacacctgtctctagagaaaacgaaaaaattctacttgacacaagtttcataaagttttgaatttattgactttggcagtaaattaaaaaaaaatgctcaactaactgcaaaatgtgaaatgatagcccttttccctggccccaaactaatgtgacatacagctattttatagtaacctatgaaaggaaaataccccaaaatacaatactacttactttactgctggacattccacttgaaggatgaacaaacaaacatctgtaaaagatacaccagaaaggtgtgtagcttggcaatgtttgcaaagtaactggaaagaagtgaggctatctctctacagtaaaagatgcttaagaaaggccccatccgcctgagataaaagcaaggcatctcacctttccttgccaccttttcatcatcacatgatgggtgaacgcagaggcttagctagagagggtcacaacagctagcagaagttaaggttaaattgggtctactaacatattctgtgtcatccagaggctctaactagaccaatgcttttgtgaagctagattctggatccctgaagggaagaaacagaagcaaagctgaagacgtggccgtacatctccactaagtctggacacaacagtgagttggctgtcaaaagtcggctttaaattgtgcacactggcccatgcctgtgattccaacatggggcagtctaaggcaacttccacactttgtctcaaaacaaacaaacaaacaacaaagtaagtatatggcaactccagaatatatatacataacatcatctgccgcttctgaatgtcatgagcatttagcttttgtagttcaaacattagcagatgatcccctaatccatacaacaacctcaatgatcaaacagtcttattattaaagactaaaattatttgccaagagcccccaaaagagtagtttaggaaacaacattctaagtttccccatcgtcttctctcactttgccactctagttctatactagagttggaagcattggctttgttatttgtaattgtgtgtgtgtgtgttaggttatcctggagctggagttactggcaggtgtgaactgcccacttagggtgctgggaactaaagatggtcatctttctaagagcagaatgcattcttaaccccaaagccatctctccagccccagcagatctctttaatatacacacccactgtctgttacatgcctgtgacgttctcattacttagtctgagatgccaggcattgagactaatagatagctaactttctaaacaacagacatacatggccacatatttcagaagtaaacacaattctaagcacagtaggtattaataatgaaaatttaagaagaaaacttaacaagttgagaattaacatacctttatacaaacaaatttcaatgggggagatttgtatctatttaagaaatgttaaaacatgactctaacatcctgagatacaaaatgttcaaagtacaaggaggcagcctgacaggacagttcccagatcatttatctaaaatatgctttctaaacaaataaagtgacattttgtaaagtcaaatgctgtaaaggcctgcttgtcttttgcacaagtggcagatctgttatcgtcctcatcatattggaagcttatccagaagatgccctctcggtaccctccaatagctctttgtacactaaattcaccccactatcacactgtttctctggattaagcaatgtgagacatttgaagaggtctttgttgttgtaaaatgggaaaagttgcatttaaagcattaaaataattgtggtcacttggaaggaaaaaaaaatcagcaaaacacagtgccagcattttatgtcagctattctgtgcaaaggactagtgcaatttccaactctttaattaaggagatattctgtgaagttgggaagaaatgttaagttgaatgtcatcccctttctcctagaatgaatgacctctgataagtatctgaaccatttaaacacagacacaaaaatgtgatttttaaaaattcaacgaacatgaactctggagtaatccaattaaaaaaaaaagaactattttctaaatttaattaagcagaaaagagagctgacaagcacatgagttacctaaataaactttgaagtgagacattgagaaaaagggatgtcgtcttatgttacctgagcccaaggtgactgtttctgttttcaactgctagttagttatggctagaacacaaatctgtctcttctcttataattaattctcggtgtcaaaactgctagatgtccttttttacaaccaacatacctggctattaattataccacaaaactgttcaaataatgttaatactcaaagaacaaactgtagagaaagctcaattaatgacttaggtaaatacatttactgaattattttgagcagaacagaacggtttattttgtacaaacagcagcagaaaagatgatttttgaaaaactagtaaatgcataatctaaacatgtatacataggaggacgcagtctccagacactgtgacaaatgcagattattctcagacatccatcgctgggtccctctgcagagtaggcatctaatgctgagcaaatgggcaaagaaaatacagcatgtattccacatcctttgcagaggagcaacctaaaacacgtctctcttaccttttcagacattcagtggcagtggacaattttccccgtggtcttcactgcgccaagtcccaccctagcctatgacccagaagctgcatggaaattcagaatgaaagcaaaagggccacactactccagggactgcctgaagctggcagagacgcctgggctccctagagtccaggactaggtgaagtcaggaagtgccctactaccgataccacaatgacacgcggagactgtggttagtactcagtggtttatctaactgcagtcagcagggcagccactcaccagcatgagaagaaatgatgagtgggacaaccacagacccatacaagctgaggtgagggaagcaacatctctgggcatccttgatgtacttcccatgggttagacactcaggccctccacacacgttccagaaaacattgctattctcctagcaaatgtaaaaccaatagtccaaagtcccggtggtctgtgtctttttcctccagagtatacttgtccaggaaaccacacaggtgggcaaaattgaagatcaaatcaaggctagataaacagaaaaatcattcacacttgcacagtgataacctttgacagggtaaggggtccttttccccttcggtacctgagaaactcacatgagtttggaaagggccagctagcttcctctgagatcccaggtactgtctggctttgcacccacacaggtatcattctcggacttaagaacagaatacccagccgggcattggtggcgcacgcctttaatcccagcagaggcagaggcagaggcagaggcagaggcaggcggatctctgtgagttcgaggccagcctggtctccagagcgagtgccaggataggctccaaagctacacagagaaaccctgtctcaaaaaaccaagaaaaaaaaaaaaaaaaagaacagaatacccggggttggggatttagctccagctgacctgaacaagggggagtgcatagaccccagactgatgtctgggaggccagcatgggactgatccagacccctgaacatggatgtcagtgaggaggcctcagcactctatggggcctctggtagtagatcagcatttatccctggagtaagaaaggtctttgggagcccatcctatgtggagggatgctctctcagcctggacacatgggagagggcctaggccctgcccaagatgataagacagacttctggggaccccatggagggccttaccctccctggggagcagaggcagagggagcagattgacatgtgaaacaggcttgtttctaatttgaactaataaaaaagtaatttattgggaaaaaataaaacattaaaaatgaagaaaaacaaaacaaaacaaaaaaaaagaatacccaagggctcccatcctttcaaaggaggaaacaggcagaagatgtgcaaaggtcctggccacagtcaaatgtctgcccttctgtgaagctgagattagaactcagactggacacacggtttgctgttccaacaacagacaaagagctattttatgttgttttgcacttggccctggaaaggcagtaactcttatttctcacaactacatgatgaaaacatgaaatgacatcaaacatcctctctctgtgagagcactcactcattaccttgagagaacaccatctgaatttatacgttgttattttcaaaacaattccatttcactaggagaaatgcagaaataggtaattttatttaccccaaataaaattttgaatttattggtcaaaaataccaggtggctcgggtttaaaatacaactgatgtaaagatcagtgcatcacggcatgagacaccgttactgactctttatgtgcttccaatttgattgctttggccttgcaaacaagtggcagtaccagaaacctattagtatggtaatacagcctggcctggatatgtatgagctctacacttgcagggtaacaagtaaaaacaaacaagtaaagctgcagtgcacagacctgtcctagacttccatctaataagaaagtaacagaacaaattacaaagtgtacaaatttaaagaacagttaggatggccctgctgtaagtccctatggaagtctcactgcgtctctcttctatcccctcgttctgcgttcagtgcatgttcatttcaaaaccccagttaaaaaactctaaaatcaccactatctatttctgtctgcaatacaacgaatacagtgaaactcgcatccactgcaagcggtacagctgatagggttactattcagttacaaggagagaaataccactatgcaagaggcgtgtgtatggacgtgaacacacaaatatttttacactctaccctcacttctatatccatatgttaacatttggccggctttggcctgcattttatattgcccccaatcaaagcagtttgatcattttaaatttcatttgccatcatgaacctatttattattataaagacatatttcacaggatgaaaactggagcactaatgacaaactggcgggcatacccttaatggtcaaggtccagtttaaagataatcctagagcttaatgccattaaattattcgtgtttcattgctgcaaattatataacataaaatatgattgcaaaaagaaaatggtaaaggttttcctatttttgttcaatctctgtaacttgacaacagaaacatgagtatatagtcacacaaatgaggcacccagatctttatatattctatttgctctatggtagccagtcacataattcaaatgcagaactatcccctttgaactaaatgaattctgctataatggagagtggcgacttaaaaaaattgcttacaattgcacatacaagtgaaaaagatagctaagtctaaattaagatgttggctatgagctttccaataggaccttgacatgactgttgacctgctcatgacatgatcgcaccagtacggatttggaattctattagtattaccagaggaaaaaagtcaaggagtcatcaagaaaacaaatctatatcttctactccatcagccaattactgttgttaaagtggaattagatgggtattgacaatgcgaagggataaggattaagcatatgactgaatatatagcaagcagtggtgagcataccggggctttttaacactgttctggttttgctgtacaaagttttgcagaaattctgaaaaattcagatcatgagaagcagattaattgctaatatcatgcctggaaaataaaaattatatttgctgactgcataatgtacaaatagcatcatttaagaatactatttatgcaagtgtatattcaacagcataacaaagattgaagagaaatctgtgcctgcctatgaaagcagaaccatgagaaacattccctaggtgaaagtgctttgttttgttttggtttaattcagaatcatatttccagctagaaaagtcatcaactgcattttcaaaatagggccttgccttataaagcaaggacaatataaacccagtaatgcaaagtgccaagatttctgtgtgttagaggagcacgcatggtcttgctgcagggcccatctctgcatcaggaagcaccatccactatatttcaggacccagaaggacataatcaacccaagtcttcactgctggcttgtaaaaccgtacatattacctaccatgttacatacaggtgttacgaagctaaataagcatgcttgtgtaaaagcttggcataatatcctaacagcattaaacagctgtgttcagaaacacaattaagttttgttgcatgggaagtgaattctctaacgggcgaactggtcaaaatgaaaacacccactccattctggttactggtattagagtactatttacagccactggttttaccccatagcgtaaccctccctgttcccagggaatgtaaagcaccaagaagacctgacttaaagtggggggattaccaggatacagtgcaaacactgttttaaggagaaacgttcctttcactttataattatcttacaaaaatctagttcatgtttttgttgccatttatgccattctctctttatataaacacttttacccacctacaaagcgtctcactgggggagtaacttccctgttgtttatttatcacacatcgcacacacatacattaaatgctttgtcttctaaagtcagtggtggattaatggaacaccatggatatgagcacattcactcaagcctaaagctcttgtgtaaaatgataatccaatgactatatcaaggaactggagaagcatcacttgacaagccaagaatacccatttctgtcatcatgttatggagttggttatcctctcattcatattaagctcctggtaacaacattctgtactagtcaaaatgtagattgtgcacctacaaaatccaccataaagtctctattcaaatgcatattttgaaattataatttattatgcatcatgtttcaaccttcaggaaagaacttattaattccaatgaactgatgtgttctaccttgctgtttttaagtacaattcctcttaagttaagttctatatatatatagaaaaaatgacattttaaagacacaattaaaatccaaatgctagtcacatattataacttaaacaaaaatgccaacattctttaaaaaatagtactaaaaaatgctcagaattaaggattccagaaacaatttattcataaaactactaagaggctcggaaaagtgttattaaatttgagtactatctttaaaataaattctaatcaaaaccaagaaagcagagatgcccaagcacacagacaagaaaaaacctctatcaaatctaatacattcagcttggcctgccacatctttttgaacttattggaaaattcgcttgacttaatattgacacagagatgtgtaaatcaatacattcagaatgaaagatatattttaatttaaaaatgttcaaactgcagcagtaaatctatgcactgagcacatgaaaatcatcaagagtttaagtgctgggacataaccctggggctgggcaacacctaaaggtgaacgccagacacaaaattccaccattaaattctcactttttaagtcatttacaacaaaatctttataacaatttactgaaatatacttacaaacaccagagaaactgaatttcactgagaaactgtcaaaccctgcaaccagggcaccacctatctgctgctggtaaaatggcttttttatgtatgactacaactatggtgatctttcagagtgaaaggagaaagggccagaagaagtgcccttaatctctgtggcttgaagtacatgcaaaggcagcagcctcactagaaaattagagtgagatgctctgaaacataaagcatacaacagattttgaggtttactgtaagaaaacataactctttgctttttgctataactttagtactattgatatatagtattatacacactgtcacacatttccaggatacaaaaactgtaatcctcagaatctaactttttctattttctgcaaaaaatggtttactgatacccaagtctgacttattcaattgtatcattaatacaaactatttgaatgtaaactaagcagtggcctcatatttaaccagctccacagactccctgtcctgactttatacaagggctggaacactaaaacccatcgcatcctccttactggtaaagcagcccttcaagttttcagtttatagagtaaggaaatgttttgcttaaaacaaaaatacaaaaaaaaaacaaaaaaaaaaaaaaaaaccaaatggttaggaaacccaagtgaatacagaaagagtacagaaacacagtcacaccatggtggatgtcatcagtacctaaatttcaccaatcacctcaatgcacgtgaagggtctcactgcagttagttttctctacaggcagtaggcagctttcctttgggaaaagaaaagcttttttactttgcccatcctttctgttcctcaattaccccctcaggccttggctacttgcaaagggtggtgcccaattccacttcaccagaatcctctggaagtttctgaggagtgtgaactccccatccctcccaaggtttaagaagtcaggactcacattttcagaggatccgtcacttggaaccctacaacttgtggagactgagtttcagaagcactgctttgcacttgacgtttctgcctctgacttcactgtttacatactagttaacatactagtcctagattaagaaaggtagaaagtgccatgaaaaccaaagatcaaaaaccttcatttgacaggtaagcaaagtatgcagaaacattaacatgaagcagaagcccttgtggtagacaggcctccaggggaaggcaggaagaaaatacaagattaaagaggttaaggactaagtcaagcatggtggcacatacccttcaccccagaatgcagagggaggcaaaattctgtgaggtccgagacagccagaacaccgaggatggattggatgatagactgatagattgatagactgatggatggatggatggatggacggacggacggacggacggacggacggacagacagacagacagacagatgggtggatagatgaaaataaagcggttaaggacttacggagctcacataagtaaacagggtaagcactttaaacatgaccctggttcacacatgcatgtaaggccaaagcttctacatgatcccacctctcctgccaccttcatgctataatgctgccaagggtatctatgttcctgtgacctcgacttgtacacacatgtacatggccagatatggtgtgcttgcttcccgggagaacaaggttaactacaggaagctgtgaagtacagattttacaagtatgctacagatttgttgagctcaaggtcaattttggccaactccttctatgacacgtctcgtttaaccctcttccttcctgctcaaacgcctatgcccctgagaagtgagatcaggcaggtgaatggcaaaagtcccaggcagcaagctaacagaaacagcaggcgagtgggtggggaggggggtggggggtggggggcgctcagcagcagagtgcttgtccagcatccagcacaagtgatgagtttgatcacagcccaggtgtactgggtacacttgcagtcctggcacttggtacgtggaggcaggaggatgaaaagctcaaggtcatcctcagctacacaacccgtttaaggggctcctgggatagacggcactccgtcttgatgaacaacgcccagaaaccggccctgaattgggctggccactattacctgggtctgtcacgtccactctcctctatttcttccttgttctctattccttgtcctctttgtcaccctggtcctgttctacttccagctgctcattgcagtgttatttcaataatgcttgatactctttaaaaccatacaactgttagaaataataactcacagtgctatatagtattgttaaatcttctaccaagtgttttatggactagtttcatgtcagtagcttaaagtcaacgtaatcccataacatcaaatgtttttgataataactgattataaagatgagctctgtataacagaattctttacatatgggaaatgtgtttaggctttttatataacattatcagaatgtacacagagaagtataatcaggaaataacccccaaaatgaatgacataaactgcgaccgcacaatctcttgaaaagaatatgttcactactgatgtctgtgtaagaaagacactgtggtgtgtccacacaggctctaacaccaacatactgtggcaataagacaaagggttaaactacagattgtgaaggaacaacaggcagcccgcatacaaacaaccctagatacaactggacagcatgtcagtcaagagtgtgagggactagagtaaatgagtgagatggtcagatatccagggccttactgtagccaacttttggattaagaaaagacactttaataggtagggtttatgctatgatacaagtaaaaacactgaagcacaccattcattagaaggataccatgtatgattgtaaaaccattcattagaaattctaaatagaacatgtgtcaacacagactaagctttcgctacatgaaaagtacatgcatgtcagaatagactaaacaacacattacacaacgggatcactgagcactggagatgtggctcagtagttaagagtgcttgctgttcaagtaaaggacccgagctcagcacccacatggtgactcacaactgcctgcagctcagattgatagcttccatgggctcctgcatgcatgtagtgcacataaattaattcaaaaaataacacataacataaataaacatatctttaggagctgagagatggttcagaggttaaaagcactggctgttcttctggagaagccaggtccaattcccagcactaacataacagctcacaactgcctgtaactccagctgcagaggatctgacactctcagtcaaacataggtgcacgttaaaacatcagtgcacataaaacagaagcattcaagaagtgctggcggggggggggggggagggagactggagagatggctcaggggataagagcactggctgctcttccagaggtcctgagttcaattcccagcaaccacatggtggctcacaaccatctgtaatgggacctgatgccctcttctggcctgcagacacacatgcacatagagtactcatacataaaatatataaacctttaaaaaaagagaaccaataattaaaaaactgggctaaagaatgacctacaatgcggtacagaaaaaaatcagtgaaagagaaacaggaaggaacctgctgggggctgagactcagccttcatgaagtgagtaaactactcttgcaaagcaccagaattcagtttctaagcaaccatctgggggtgctcacaacagtctgtaacttcagttctaagggatccaacacccactctggcctcagaaggcacctgcacttgcatgcacaaacacaaatacacataaaaataataagaaaaagagtttaaaagagtataaaaggttcaggcatagtgagaaggctcattaggtagatatgccttgctgccaacgttgacgacttgagttcatgacggaaagagggacctccacagcttgtatgcgtgtgtgcccacacttacaaacacaaataaacaaacaaatacaacttcaaaataggtagatgaaataagttccaccttgtcaataaactcaaggtgctttcagactcctcaacttcatttgcccagcatgctcggagatgtccgggacctcacactagactgtctcctggactcttagatgactgggactttacactaggttgtctctggagctcttaggtgaatgggaccttacacttgatgggggaagtacttctgtgtatgtttatcttgttgattctttaataaagttctgcttggccaatgaaacggcaagttaggcaggattaggaatcaaagaggattctgggaaatgtagtagaaaagtggtgacccaggcagaagtgacatagcaaggagactcatatctaagcaaggaaacaggaagtggccccttttttcccttcgcctcctccagcggcaggatgtgatacactggcaagggaggacgccaacaaggcgtccggtaagataagtcttataaaatatatagatttatgataattaagactgagctaacagatgaggaatcctagtcattggccaagcagctttgaacctaatacaagtttctgtgtattcatttgggccttaactcaggcgggcggctggcgtaaagctcacacatggcgatgggctcaggtggcttttggcagaaagatttattgtaacatacactagactgtctcctggactcttagatgactgggactttacactaggctgtctctggagctcttaggtgaatgggacctcacactaggctgtctcctggactcttcaatgatcaggaccttacactaggctgtctcctgcactcttaggcaatgtttgtaagtgccaaataaagttggaaaattccaaatacttaacattgcattaggaaatgcacacacatcctaaagcacatatgactgaattaatataaagttgtagattaaggcaaagctatgatcaacacagcattctctacagtaactgcctctgagaagttctctgcaagtctgaactaagagaattgagctcttttcataagctatatgggaagcctatgggccagttctttcttaaatgaagaggcatgtctacttatgataaatatgcatattcttcaattctacagatcaaacacattcaaacgcggtcttttcatactcagcatgttttttttgtttgtttgtttgtttgtttgttttacataaagacatgcttggaggaaatttattttgatgtgcacatgagtaagttgaaagaagcaaatgagtgttggaatgctttggaccatacaatcagtttatctctgacatagttaagagcacagtcaggatggagacctgcatcccctgacctcaaacaggttctcaacagcatttcccaaaatatgagtcccaaaaaccatttcaaaggaagtgaagaaaggaagggaagaattttcttttttccaggaaatacaaaaaaaaatgattacttctctataatgttttgttttaatgcatcagagaactaaatatagactactttgtatgggactctctacacaaagttggctccagaatacaccttcaattctttcataaaataaggtttttaggaatgcgaaattatatcttaaagtatagacatcaaagtagaaagaaacacactaagtaaattacagggggctttgaaagccagtggacgaagaaccatgaaaatcaaaatgtgacaaggacctgagggtcactaggctgaaccatgtttccgaaaggctccattaagaaaactgtgaagggccaggcggtggtggcgcacacctttaatcccagcactcaggaggcagacgcaggctgatttctgagagttcgaggccagcctgatctacagagcgagatccaggacaagctccagagctacacagaaaaaccctctcaaaagaaagaacgaaagaaagaaagaaagaaagaaaaaaagaaagaaagaaagaaagagaaaaggaaaaaagaaagaaaactgtgaagagcagtgtggctgtcagaaactccatgtgaagacagcgtggctggcagtgtggcacactcatcaggctccaggtaagtgtgttaataagtaactagatgaatacagaagagctgaactggaaaggaaggcatggctttcaccagtggtgtaaggaggagtttccaggatctgtagacagggcctctttgcacagccctggctgtcctggaacccactatgtacaccaggctggcctcaaactcacagacatctgcctgcctaggcattcctgagtgctgggattaaaggtgtgcatgactgtgtcttcctttaaatctacatagcctgtcaataattacaataaaagtcctggaacttcatttctgtgctctgccctttacagcagaaatcagacaggttcccaggttggtgactagatggtgacacatttaatactgaagtcacaggtgggccgcctagatgaacacatgctcctttgacaattcatcattaatattcatccaggtagagcatactataacttaaatgacctgatctttcctcagttgaaactccttagcacttgaccaccacccacacttgaccaccacccacacttgaccaccacccacacttgaccaccacccacactgaaatctacccaaaggccttgatttgtcccagatctcttacaggtttctttcccagcacaattatcaagaatcacaaatgtgacatacacgagtatttacttttcaggctagccagagattataaaaaccacattttcagttgggcttgatttaaaatgaaaatggatagcacaggtttctccaaaaaggagtatctataaacaagtctaaattaacattcccaagaaccccaggctaattctgtggcaatatgttgaggtctactgtggttagtttgcattgtcaacttcacacaatcgttgtaaaagtctctgtgagggactgtctagattagggtgacttgtgggtgtgtcaggataatgttagtggaggctaggagacctgcccacagtggtagcgccattcattccctgggtttggggtcctggactgtttaatgatgaaaacaagctgagtgtggtcatacatgcgtcagtctgcccctctctactccggacaagagtgcaatgtgaatgtctgtctcatgctcttgcctctgcaatttctctgtaatgacacaccgtatcttggaacagagctaaaatgaaccctttctccttgaagtagctttcatcagtgtgctttatcacaacaacagaaagtaggatatgatctgtaatgtgtaaaatactgttttagacaccaagaagagaggcagacaagtcagaaaggagtcccttgacctctaaatcaaagcacttaataatgccaaataggaggaggtaactccacacgacaggagatgctgttgaggagggagaggccatatgaaggacataattaaagataggcagaagaggcagaacaaagtgcctctgccttaggctctaggctgcaactcaaatgtagttctttaactccatattcctggtttttctactaaataatgttacatttcataaagtgttctttagaaaaacttagtcagccaaagcacagtagaaacgacctctgtgttatttcccagtaagtgcaatacatttatgtgtctggtatgacacaacttatgtgagttgtgtataagtctacatcccaagtggctgactttcctaacatcaatcatttaccgcctctggcttcttgagcacttgccactcagaaaataccttttggttctggagctcaatgacaattttcactttaaatacaatttaagtttcattataaaaacaacaacaaaagttctatttacataaactacatcttctttcagtgttttaagaaaagattcatatacctgataggatggtgtgtgcttgtaatcccagcactcaagagttcaaaataacctgcagttcaggctggggttatatgagatccccaatgaagaggtgggggtgggaatggcacagccaaatctgcatgaaaatcttcatggaaatcaccaggaaaaaggctgcaatttgatcgtgaaatggtgattcttaggttggcaaagagccagcaggtaccaggacccagagaccagccgagaccagcacaactagctctccaacattaccctgatggcactttcaaactataccttttcttcccccactattgtggtggagtatagtgggaaattaccaatacggagtcaggtagaaatataagggtatttaatagggaaaagccttacttacagagagaccacgcctacttaggggctggctacaggttcccctacagtggaaggctgagcgatgctccctacccttggtttaaaaacccatataaggagatgttattatttccccagtgtactgagatggaaaatttgctgagaactactgagttagaattccaaggaagaaaaaaaagacctagttgcctcctacacaaagataggaattagaaatataatggcaaaagacaaagatgagatctaggaaaattttagttaaaaaagaaaaaagaaagcaaaacaagcaagagaatgttagtcatctaaaaagtaggaaaagggtaagaaacctgaaccagatgccaaggagacgctgaagtacaaagaaaaattcaagatatacaacacaaaaactcaaggtggggtcccagcagaacatgctgaagagtccagcacagagacaggaaagacaaatcaacaatcaacaaaggcaggagctaggtcctcaccaagaattacggaaaatctgggccatacagagagacttggcagcagctgtgtcctgacagccacgctgtgctgtgtccaacaacgacatctcagaatccatcaagaacctgctctttcccaggcagctttgtgcttttaattattgtgactagtgaaatgatctcaccactgaaagaatgaggtttcttctttcctttcttatgaagcactttgctcaaatttaactcaactaatccaatttgtgtcagtctttgaagaattccaaaccatattattaacacacttcaaaatgcaatctctgactcacaacggctttcacatactagggtcatcattcatacatgtcactggatgttaacaggcgaagcagattaaaacgtcctaaaagaacattctacacaggtaaaccttctacttgaaaagtcaactgatttcaatggagaaaggcatactctcctccctgagtgaggtaacaacttaatggaaagaataaattattttactctaagcataaatccagcattatgtattttaaatacaatgaaaatataatcaattatgtgactagtaatttatttgtttgaatgaattcaacagaaagcagtgacaagcacatctttggggcactttcagtaacaggattcaggcattatgctgccctgccccgtcacctggcagaatgcactcaggaggtaccctggtcagcccaggtgcaaaggaccccccctcccccatttgctctttttccaactcccctctttcctgctgtttccctggggcagacaggactttttctgtctccctcttctcttctgtcctctctctgtctctctttacctttcccccaccccttccctttctaataaaacttaagctctgtctgcctggcatgttttgtccctcctcctcagtcaccctcgcctgccatggaatccaccaaggtccccctcatgctttatcataacagtaacaataaggttagtaagtaagagtgagctttccatgtgggccaattcagggagcaaaagttggtttgtcttcctgggtgatatgagatgcagttactctggtctgctatatgtgaactcatacactaagtaactaagaaatgtagttactctggtatggaatcctaaaaccttccagaatggccgactgcctcagttaactgaccgagtcttttgttatgccagtacctgccccttccctcttgttgcatgccaccacctcacctaggaagccgaaaacctgtgggtactttaagctatctattatcctgcacaggactttcctgttgagagttccaaccctggtttcacctggaaagcggccatcactttagtaaaacaggtctcaaggtctacttctttacacaatcagtcctggagatggctgtcttcctgttacagacaaacagcaaggatgtgggctgtagctcagcggtggagtgcttgcctagcatgtaaggctctgagtttgacacccagtactaacataaaacaaaaatctctttataggaaaatggacagatcgtgttaagcaaaataagaaacaggacacagcagactaccaggcagatgttacacattttctttcagatgtgaactccagattaaaaataagtaagacatgaagccagatggggagctctttgggaggactaacagagaggagaggatggagaaggtaatagaggcatgtgaacatgagcgatgtacctggcacatgtatgtatgaaaatgtaataataaaacccatgttattggtgcaactaaaaaaaaaaatcatacagtagaaccagttaattgctttataagcaaacaaatactctaaaagacaatccaagcaataggaaatttacaggttaaatcagttttccttttcagattccatagaaaagttaaatgaagtcagacaagccctactcatgtgagagcacggcaccacccaatgagtatatctcaaatcattttcatttattattttctaatgaactgaaaacagtcatgtttgtaacagctagtactccagtgaagcttgtacctgaacaggtttgcagaatggcacactggtttgggattacagtatatttttcttgagaatattttttttcttttatcgaggtcatttgagaccaacttttcacacaataacagtagaggtagtcatctcactgatgattataagaaaaacacaaaagggtctttttggtctttgtttttatgtgattgaattaaatcctatactgtaaaaacaatataggctttaaacaagaatgttaaagaccctcctgctctctgctctggagccgctatgtgatctgccggcaacagaggcgcttacctcaggtgtcctccataagataaatcttatgattatggttgataattaagactgagctagcaaaaaaaaaaaaaaaaaaaaaaaaaaaaaaaaagactgagctagcatatcagagatcctagtcaattggccagcagcattataaaataatataaatctgtatgttacttggagccctaacgtggcaggcggaactggagcagcttcggtggaaagatttaccattacaaagcagtttctaacaaatataagacagttacattcctacaagtagaaaactaaacaatacacgatcctacagaaaagaatcactaaatttcagtctactgtcaagagttagacaaaaagcaatgggtgccttggatgtttagattcaaaccaggacaaagggagcagagataataataacttgacagaaaagtgcctgaactctcaaatagtctaacagaggatgctatcactaaaggatctgcaggcccacttaatgtctgaccattctcacagtacacatttaagcttagcttttacaaagacgtagtcacccctcatctacccatcctcccacgtccaggaagcatgctagtcatagctgacttgtagtttatgctctgcaggaggaggcacttatgcactgcagaactgggccagtaaacacctttctctccttctgactggagcacttctttaaaccacttgcatctcaatacctgtcctagagaacagaggcatgcctgccccagtatgagactgtctaagctactccttacaagcacatgctcagccttgcagcctcagacatctgagcttggggtgtcccaagcagatgaataatagcagatcctttgtaaatcagactgtctcatttgctctgatctactctaaggacatatagtcagtaaaacatgggatggaaggaattttttgtctttttccatctggatcatttgccttattccggaaatggccacaacagtctgtcagcagtgaagtgggcagtcaggctgaagggaagtgacgcctcagcaggggcggatttcagaggaagctgtgcctaaggtgcatcttcaaggggacatttccaagagtgtagacatagtcatttcactggtgactgtaagtaccacacaaagagatctttttggtctttggtttttatgtggctgagctggggtgcaagatttcaaacggttaacagcagtaggggaacagcagaggcttgaagaggcacattcaggatgtaagctactaggtagacaaaggacacaaatgtggaaaaagaagctagagccaaagatccagagaagaacagaaaggaattccatctgacactcatcaattagataagaaataacgggcaccagcaccaacaaactgacagctgctctacgataacatccacagatcagtgctgctgtccactctggttaaagaagcttctttctgtagtggggaggtaactatagcaacttatagcccatccaagtgcgcagtcctaaactggtatgctcagagctggtggatgggatggagtgccagggagcactgtttcccaggtacaacataactctggcccttctgaactctcagagcctgagattagatgcaaaggccttcataggattgggtgtggataacattccattacagaggggggaggggtgttgctaaggaagaggggctcacaagaccccacccctccctaagaatgtatagacagttaatggttgctgtagcaaagaggaaggtttcttctgctctgtagccactggtaagtcaccctggatcctgtaaatgacactagttaaacccactggtttgccaaacaaaagtcatgaaaccagaagggggtccagctgggaagaagggacaacagagggtcaaaagggtaaacgtgagcaaaggacattatatacatatgtaaaatgtcataaggaaagtattattaggtataattaatatatgctaataaaaactattactggtcttttagaagacacaagttttggacatttatatattttttacttgaaagaacatgatttgatatactttcatgtttaatgtgataagaaaaacaaattaagaagtacacagaagtcagagattaaagcttgtagggctagctgcgttttatcaaaacttctaatttgtaatatagaaattaatttggctaaaccaaatgaataatatattttaaattatatcaaaattattacatttttaattgcatttttaatttttaagttcacggctttttaaaaatgtactattttgagataaataagagacctgatgggtgagccccaggctcaatcctcaataccacaagacccccaaataaagaaaaaggacttgcaagcaaagtctgacctttgtagtaaaaatccatgttaatatgaagttagccaaaatactgacctctctgaaggctgctctgaccacaccagtatcgtgctttagtggtccactagtaatgtaccatcttctatggttacagcacatagaactgccagtaagttatgatttcaatcaaatcagttactgtcatctccattcctgggagcagccattgtgaaatagtgctgcagaattctatataacaaagtttagaagtttaaacctgacactcggccccattctcattaaattagtgagaaagaagctaatccctgccctcattcttaaactctctatgaaagggtagtgggagggagtgctgatgagaacaaaggaacaccagactgattccagtgtgaaacacatgaagacagtctaaaatcaagttattatcgttagtgttcactgtgcactgtcaggggaaaatgctctgaaatgtaacttaagataacaaagatggagaaggttcataacactgcatactgaaatttccgaagataacaactctattctaccgatgtatatttcataaggacaaccagatgatttcacaggcttaggaaggattgtgaaacagcaatatagaaatgcgtatttataaaataaaaatgtacagctgaagtggagatcagaattaatgagaagacctcagtataaggcctgggtttggacacagctagctgtactcacttggaatgccactttcaagttaacgatgttgggaagtaggttccaattatgatcagtatttgattctaactcaaacagatattttttccttgtgtacacttatatgaaatgatggcataaccccatggacctctgtatctctacctttgattcaaaatgaatcaatgacaactatcagctaacaattttctatgtacttgttttatgaaatctcagccttacttgagaagttacattgaaaagtcttttcatctgctactaaaaagaactgactggattgcatttaagttcaagttcaagggtattaaaatgtacacaggagagtgacgaaggttcgaggttatagattttaacttcctcagtagaaaattgactcaaaatagattttctaatttacaatgaatcaaaagagaaaacattagaccatagcaaaaatggcacaaatgtatcaaaagccaaatgaataaacatttgaggagatttattattagaaattgcaataaattttggaatgatgaattgattttagttaaaaggtataactgacaatttattgggcgggaagatgcattattttccaattgttctccatctacagtaaaactgatttgtgtcctattgtattttatggaaaaggagagtgcaactttcagtgattcagattaaatgtattaatcatgaccaagcactgtgacctatatatctactattaaagaagatttttgacatttaattctgtagcaatattttggctctgtaccactcttcctaaatccaattcctgctacagttggcagatttctcccttttaattttatgaggctgaaagtagcatttagccacccatgcggtaaataatgcaggattagaaatatttagtgttttgtttccctttcaagagtggtaatccatcaaatccaaaaatgttctctaaaatttttctatatttttggcaatctctaatatatggtatcataaaaactataaaattaaataaaatgcattacatagacagaagagatgtgcttttctgcgacagcccaggaaagcaggtaaaatggactgagtcaggaatgggcaacctttactggaaaaccaaacaaaacttaaagaacgggcactcaaacttggcattcgattaggaacttttattcctttgctgaatgaatcttagtaaatttgcaaatagtttctaaacaatttaaccacttattacccataagccatgtagtactgcagaagtgttagattaagtaggagaataattatcaaacatttagatactctccgaatatgactaaaggaacgataaacactaaaaatgaatcttaaccttaatacatcaatgtaatgtattaaactaattcattgttttttaaagtgaaatgcaaatctaaactacattcatgctttcttacagaagctaatatagccagtttgactctagaatagatttttatgtttaatacataagcttagaaattattaaaacccacaattttaaaagtacattattaagccaaaaaatcagaagaacaaatccaaattccaattttcaaatctaaattcatataaaatgataattttagttattaatgaatcaaattattacagtaatcacccgataactgcacatggtactttgagatatatcaaagtaataaaataacctgtcaaatgaataattatctgcatttaatctatatataaaacaaatggcccagaaatgagcaaagcctgtaattcactcaagacactgggatgccatatattcatggttagaacatctaatttcttcatacatattcatgtcttaattcacttttaatgaaattcataattacaaattattgtgaaaacaagtttatattctcatagtgatgaaataaaatcaacaattacctaccagaaatgagataatttaaagagtgtatgtgtgtgtatgtcggaagaatctaactctactttttccatacataaagtgtcccttcttgcccttcacagtgttacactgggaaacatgagttacatatggagagaaacatctttaagagtattccaaaacaaagtaaacgtatctcaaaagcagacatagtgtcatgagagctagtcaaggaaagacagtgccaatactgtattccagggaacaatgaggagaataactggagcaaacaatggattctagaagccgagaagctgctagaggcttttgctattgtgtgctcttgtttgtgtttcaatatcttagttggtaagatggatggtttgttgagaggtggtctcacctagcctgggctagccataaactcctgatggcttagccttacaaggaagtattgggattatgggaatacacccatgcacccactgcaataatattttgaaatgtaataaggaaaacaattagtcaaacgtgaagaggtcagataatgccaaggttgacgctgaagccaaattacttatttctataaaaattgcaacaatttcaaaagattaagcattcaataaaaattcccacatctacatcggtgagaaccctactagattttgatcaaataacatatgaagctgacaatacatttattcttgtggtctttgaaaagtgaatcttcaggccagaaccctgcaagcggaaataaggtgcacagggcaattcccagaaagccgagtctgctgaggaaagctggcgctcagcactcagcactcagcactcaggtctcctcagtttctgggaaatcttgctgtgcataggtgaagtgggctacactactgatgaaagcctggctactccagggcgcagggctctctctccaaccaaaccgctcagaacagaaaacctcacagaaacacaacagctttctttctaatggattggaaagagattacaatgctgatgatgatctaaaacgttaaaccaaaaagatcaaagaacagtgagaaaaagagatggtgtaggagtaaaggaaggagaatttaggaagagggagggacgtgtatttacatgatgaaaaacgtaacattaggtttggtcaaccaaatacaaaataatgatttgcccaatacactaagatgaccaaaatagttaaaatgtactattttggggagccattaggcccatccgagatttataatatcagctgggaatacaagcattttacctttgtagaaaagcctaagcagtctgacagttccatgctgaggcatggcccacagtccagattaaggcctgacactatcaactattcagactaaccctgaacaagtgtggctgtctactgtgtgcctgtgtccatgtgtgcactcatacttgtctctgggaaggccagaaaaggacatcgggaatcctgcttgctctaacactaccctattctcttgaggcagggtctcccactgagctggtagctggtatactcttcctaggcatgctcctcctgcagggcagcaagccagcaagccatggtgatcctttccccgcctggatttccagggctcagccacacccagcttttatgcagatgccgggaacctcatgcttgcacaacaacatggcaagcagttttattcactgaagcaggtccctgggccccagaaaaactatttgtccctcagtttcctccttaggctctttgtacgaaatgaatggacattcacagagaatacaataacactaaatatcgagagacaccattacaactataagaaacttataaaagtaaattacataataatttgaaatacgatgccaaacaaatgaaaatttaagtatagcttgtgatctctcagacagtccaaaacacccgtaggactagcatggtagggatggcacggggatggaggcttgtcctctagattttcaaaacctatgtatctattactttttaaaataatcaaaatttaaaagccttaggtaggacttcccaggcaatataacccagtcatgcaattaagattatttcgggtttctcccaaagcctgactaaaaaggtcaataaaaggctcaaaaggtttactccacaatgacaaagagaacgtaaaggaaacactatcaaagatggaaaatcaaagctggaagactgctgctcagctctgcctgcaaaagcatctcgaggaagcagcagtcaaaagcaagccacgtgaagcaccagaccccaggaaggcttgggaactggaggagcagcatgacttaaacaggtcccagggtgatgtctgactttcccccgtgtatgggtgtttccgcctctacgtatgtctgtgcactccagaggtgcctgctgcccacggaggccagaagagagcatcagatcccctcaagtgggagttccagaaggctgtaagccactatgtgtgggtgctgggatcaaatctgagctctcaggaagagccacaagtggtcttaagcacccagccatctctccaggcctgtgacatctgcttttgataagctgattcaggatcctacaccttggcccacactcatatcagcaactgctgccctatgtctcagcacgggtcaaagtttatcacgtgaaaattcaaactagaaaggaaccattcctatggacctccccagaggatagtattacagtcctggggattcactggaagtctgcacatggaccgctccctgcagctggtggacttgagtcatcctttcccctcctgacctaagaggaaaccctccaggtagagttcctaaggatctaccagtcgcacagccaacaagcaaggcatgtgtcacaaggcattcaattaacttgttagcacaggatcaaacaatattctatgcttctattgttacggaatgcatacataatcagtcagattataaacaatgaagaactttagaaaacagtatttgttggaaataatgttacaattacactggcatcctaacaagttaattatcgaaaacacccttaaaaacagtgtagacacagttaatcataatcaatcctgaaaaagcagtaagcacaagctgtgatgggaaggggactgtcatggtgtgcacggggcaatgaaggacatgacactaaagtaagtgatgataaacagcataaaaccacaggggatggatgggggatggatgggggatggatagatggatggataatggacgggtggatgggtggatggatggatgggtaaaaagacagatggagacatgaagagctgagagggagccatttcagagaagagtcttgaagaaaggtacagaacaggagctactccttcaagtgtatgagcctcacagaaagaaaagtttaaatactgaaagggctgacgagggacagagtctcaaaagcccatgaccatctggaaaggacagaactgtcaaagatcaggaggtaagcagtgaaaacagaaaaactctggattttattacaaagggaatggaagctgttttgtcattttaaacagggaaatcaagagcctaggatgttttaccaatgtttacttggagttataagtaataaggattagaagcaaggaaaaccactagaccagagaaactaatgtaccaacgtaagagaatgagacaacagcctgagtggtgagaggaggcttcagagaaggggcagcttcgtgtgaaggaagaagagggcagagtcggctgcgcatgtggttcattaggtaccacttagttcaacaataaaacccactacaaccactgttgccctaaataagtgcttctctcgcccctctcccttttcaaattaatttatgctagtcaaacttaggcacttaaggacaaagatatacatgtctaattgattatacctaacctaaactattacaaaggaaaaatacccaaaaatttcatggatatacaattgtatcaaagaatgtgtggctaaagtcagaagctagaaacagcgtgtttctaaatcagatgtaatatatatttactaaaataacaattgatgcgaagcattgaaatatttttgtggctgtgcaggcacacctttaatcccagacatcaggaggcagaggcaggcggatctctgtgagttcaaggccagcctggtctacagaggacagcaaaggctacacagagaaactgtctcaagattatcccccctcaaaaaaaaaaaacagtaatgtttttgtgaatcaaaaagtaagaaaagcttcaggacagtactcagacctgctaagaatgctgaggcaggagaaagatcctgacactagcttaggtagcttaataagatcctacctcaaaattaggaaaaaaaaaaaaaaaatcaaggagagctaggaatgtagctcactggtagaatgtttgtttggcgtgagggaggtcttcgttcaatccctagcactgtaacggaaaagaagaagaagagcctatgaaaggcacatataagagtttaaatactactatctggcctaaatattacaaatccaagctaacatgaaatctttaacagtccagtgcatagttctaaatgtaactgcaatatagtgtaactaacaaaaacacaccactacacctgtaatacaggttcagtattacccagatctgaaacactttcatagtaaaccatcaccaatcaatttcctgatccatacatgaaactctaagaggaaggtgctacactttaacagaataaaaaaaaaaaattatccaaattccctaagttactatgatgattagcaaacaattaattaaacagaaacattacaaattttgttggcttaaaactgaggtatacagttgggctatctctaggttaatggaacccaatttcttagatggcaggccagcaaatacctacttggcatatattaattcaacagtacaagagaacttttccatctatataatttcttcatgaatccccagttttgcaaattgaccttcagttggaggatgtacaggtgatttcagaacaaaaaaaaaaaaagtgcttcttaaatattatttggaagtgttctacccatcattgatttttgaacttttctgatggtaggcacctgacatatctaaaggcaaattagaaaactgggttttatagaccatcgaaacaattttatcagcaacataaaaagcagaaaaccagagttgaacaaggcttgcaaaaagtaaaatatatgcatttctatgtccctgcttttgatttttaaaaagaaagaaaataatagggactctggcaatgtcactaccattgtaaaaggcaaccaggaaaaggtgtgaactggaatgttcatccatggattcacattgccaccaatcagcagcagcgagtccctttacattgagaaagacagtaggtgtgaaacagggacttgctaaatagccccctttggcctggactctctatgtagacaaacctgtctggccctaaccttccatgattcacctcttcggcttctagaacttgaggattacaacggtctatacctatgcccagccttcatttcttaaagacaaaaaaggagtatttagaacatattttagaggttctgtaggatacaaagtagaagtggtgtttagctaactagactctaaagtgtattgtgagtctcaaacataggcagatttggtggataatgtctatacccacagcactctgaatcctgaggacggtacttcaactggaggccaccccagtgctacgtggagagctcatgctggctgagatacaccaggaatctgtctccacagaagcacagatacctcctgagttcccaaaaaccagtgttctgaagatccatcagggggtcagtccaagagaccgggtgagcagatgtgagtttgtgacatagcatttgaaagctggatgtcaaccttgacgacacagcaaattcaaagtcagcttggtctatttgagactatgtttgaaagacaaaagtccatagatacctaaacatattaatctgaagccattttgagaacagtgacctaagaatctgtactgcgttgtaaatgtagaaggtgtggcatccaaataccacagggcagaagagaactgaagtgctgacatattaactttggtatagtcactaagattatacataaacaggacagccaaagcccgtagaaatggttcccccttaaaaagtgtcttaatcctaacccattgtgctgaatgaactggtgtgaggaatgtatgtgctcgctcctttccccaagatcagtggttagacctaaaggatgccactagatggattaaggctgaaaaccattctatcctaccaattttactcaataatttttatttcctgcatttctaagtgttccctatggctactttcatctgcttactcttccccacccaagattacttttatttattaaaatataagctacaggtgaccatgtcagtctcattcacagtggtaggaagcaagatctacagccatacacagttgtcccactgttcaagcagtactgaccagtcttggtggaataaagggatgtcactcacatagtaagacagaggattcaaatgacaaattaaggtgcagtcaatcctctggctcacacataatggaggaataggatgggatttatacttctaatataatctaagcttatgattacataatgcactttccataactatcagtatggccagggatgacatgtgcagtatgatccaatttcctgcccatattttcagataaactgttttgctataaaccccttcatatctatctaattcatctacctattccacgatgtgtcaaacccaagcccttactacgccttcatgcctaccatttcctactgtgaacgagttggtgggctctaacctattcatcggatatcagctaaagcatcttgtttctataagagactgccccagaattctaccaagtggtttcaaaaagagagaaaaaaaacgtaagaaacagagatttcatgatacttgaacaaatacagtaacatgacaggagacatgatgagtttctttgaagtgaaagagaagagagtaaattaatatggaccgaacaaaaactgaccagaaagctctagatctggacaacattaaagattagtaaaaaagtaccgagagccagtcattaatccagtggatgccagaaacccttgatgactattacagctcatcttgatgtggctgccactcaagacagtgaagaccggtgtggatgtctcagcataactcacacttgaatatgttaaacagaaatgaagactactttagggagagaatttatttatatttattagcaacatgacagcaatatgaagaaacttccaaatcataagaattttggtttcccacaggaaaaacagtttaagatgtaaacacaaacctacattataggaatattaatcacattaatttaaatatgtaagcagtatacagaaagtatctagcacatactaagcactgttgtgttccacactgcacatttccaccattttgaagacccccaaattccagcataggaggccacacctatactaagtcacgagagcagcaagcacaaatattttaatctatggaaaaatatatgtggtcacatcttgtatcattaaaatttcatgattgattatctgtatatatatttttaaggagttttaagaatatggagaacaagcattcaaatgcaagtaagtgaataaatgaatatgctactatacaccattaaatatatatatatatatatatgtttcacatttaataatataatccaagaatatcagtattaatattaatcctattcaattatatagaataaatgttatggtatctacatttttagttatccactgttattaaattattgcaatacaaaatatagagcaacagcaaaataaaaaatctgaagtaaacacactagtggatttcgtccatgaaatattaccattttattgatttgcacttttctataatacagaaccaattttatctcgaaaatttctaagattaaaatatataaaaatctagatttcaggctgatgttgaaaagaaaatgaaattaacatataattaacaaacttagaatataactttctaaacatacattctccaatctacaaaaacactctaggcatacaaatttccaggcagaaagatactaaagggttcagctgctgaatcccactaacaaaagcttgggtaacagtcaccacataatgaaaatatcgttgtgttgttattttatgtcagtttagatttattttctgtcataaactcttttcgctttgactagtctgagaaaataggttatttaaatcccttattcaaaccaattccattttaaatgagccttctcagtaaaaggctataaagagcctaaatattcctactctagagtattgagaaactacagcacaaacactgagcaggacatatgaagagctcactacagtaagatggtccctgtcaacataacttcataaagaaagcacctataacagtcattcctggtcagcaactgaatgaactgcctcagccctggaatagaccacgcctcctttgctctgagtgacacaaggtactgtgagtatgaacagtgtattacatattacaatttatatgaagggctaacactcggcttttgtttatatacttaaatttcaaaatgtagacataaggaaatcaactaaatcacattcttttgttgttattgttgtttggcaaaataaataccaccagtacctttcatgttcatgtaaccacacaaaaccggtcttcaagcaactgtaaacatttaaagcaaagccttctaccttactacaatgtcttccataagaatggttttccaataatgtgtcttaagatgagtcttttcccacagtgttttagcagtcaccacaacatgaataacttcagtgcagattatacctgctgatgaatcactagttcaaaacaaaatagaacttaaaaatctctcacccaaagaaaacatagattaactggaatattcaggggtaggatatcctgagccaggtgtagtggagcacgcctttaatcccagggctaggaagaggcaggcagatctctgtgagttcaaagccagcctggcctacacagtgagttcgaggccagccagggctacatagtgagatcctgtcaagaaagcagagtaagacatcctggctccacagaaagctaccttttagtaaggttccttgaattcatgttgtaaaagcagtctcctcaaactcgagtctggcatcattatcatgctgtcattctgaattgtacttaatgaatatagtctagaaatgtcagagattctggctgttatcttctgggtaacaattctcctgggtaacaattctcctaaaattaggtactaaaaggctggctagcaggataccaacaaactgagtttctagccacacaacagtagtaattcccttttttggtttttggaaacaaggtctcaaatagtacaggctgactccctagtctccagcctctacctctcaagtgctggcattgctagtcttgccaccatgccaaaggtgagtaattcttatcaagaataaaatctcaggacttgtaatctcacatatgcatgggcacaattattattttttttttagaggaataagactgaattcaaacctcagtctaaaagaatagcttaatgatttaaagggaggggacatgatgaaatgggctttatagcttgaagttcaattctgaggcttaacttgttaactaaaagttcattcagaaaaattcttcaaactatattaaagacaaaagtcagatcaaacaaataagatacaaaagaaacctaaatcctataaaataaaggactctactaaggtaatgtcaaattatatataaattatatataaaacatgaaaaatttaaggtcaaattctacacttggagattaacattaagttgcattatcaggtattgtgtttattatcttcaataacaacagcgattattatttattatatactatgtactgaagatggacctaagcctatatatgtactttaaccgtatttaagcctgacagcacgtcaatagagaaaacaacgtctctatttcacaaaagaagaaaccttggttctcaaccttcctcatgctacagccctcaaatactgttcctcatgttgtagagaccccagccataaagttctttcattgctacttcatcacactgtagcatcatgaagtatctgatatgcaggatctgacatgtgaccactctgccttccacaaatacacagccattccttgttcctccttgcagattccaaatttgaaatattattatcagctagcaacctgaaaagcaatattgagaacttttgcagatattcatgggcatgggcacagcagtgaacaatgtgagctgcctcaggaaggaaggagaactcaggggacaaagggagcaggacctcactcggcctccttcctgcagccccggctctgtgacctatggaaggaggactgctctattggagctctgtgctttctcgtgcttttcctgccttcaatggccccaaattcaagctgaaagtggagtctgtcatgttactaagcatgaggaggccacggtgagccttatggagagaacacacgttagaaaagtttgttcaggcttcggtgatggtgctattatccattattccatgtttgggaatcaacaatacacagtaaacacctataaacataaatacacacacaacattattcagtccacagctgacggggacatgaggacccaagacccacacacaacctacaggaatgagggcaataactgaaaacacccctacttcaggcagttcccactgtcacttccttctcgtgcgctcctcactgcacgtttggaggtgtcaaccaccacagaccctctgctgccattctgctcaaaggctgcatctacacacgctggcgtttgctcctaaaatgaatctatctcatgtacactttggcttcccagtgtgagtctatgctaattgaaattaatttcttactataagaaataatggatgacctttaatgtgactgtcttagcaggttaaaatttttaaggtagcaaaacatacagagaattagaaaacatcagcacaaactgaaaatcttacctttcttgctcaagtcagagattttattggaaaaaaatttacagtatgtaaaaatgtaaacaaggacaatccagggttgagagaaaaacaccttaaggagtcccatgtgttcagtagaattttgaatagagcaatgtgctgggcccatgttaaacacacatacatggaaatctctgtgaagtgcagtctaatcaccgcttcacaatttagacggaggcagctccgaggatggcgcagccatgtatcatcaccaccatgaagccagtctatccgtcgtaatagcttctataaaacagcacagcgaggcggcaataagcctagaaaatgggctacaaatcccagctatgctcaagcaagcagtggaccaaaaacaaaaataggtaaagctgagccaagaacgagatagtactcatctagattcatgattggtgaggcaaagatcataggctgaggcatgcaagtgacttattcagacttaaaggacagtcatcatacaaaacaaaagcatttctgtaattcaggaaaaaagcacgaatttttgccctgagacagtataaaaaccttaattcagttattaagcacatcacccaccttttccatgggacaatcaggagggccaacttgtaccgtgtcaccttcgacttcttgtcatacattcctacctacttcatttttaaatttttcagaccacaatcgtcttgggtaaggtaatgtcaactttggttcccttccatcatatttaatttagccattaaataatgaaatgacatctaaaccatacaatacgaaaacattaaatcaccaaaaacattaatcaattaaaaataacattataagaattatgccaccaatgggaatgttttatttccctcctgcttgatgaaaatgatcttacacaaatatttctaaaactcggtggcacacacggaatgccatccaaggaagagcaagcatctcactatagatataacagtgagattcagtcatgcagcattgttaaaacgccaggttcacatgatttcatcaagttccgagacagtgaggcagctgtgaccagttcagggatcagacacacaccaatgacaatgtgacagcaagtgattccctaatatagactagtttgggatcactgtgcagttttagaggtaggatgactttcgcagtacaatgaagactatagtataaaatacaacaggtttgtaatacagaacaattatccactaggaattaaacttaacaaaagataaactcgagcaaagattatcaacctcacctacttatatcggcccttactaaacaaagtaccctgagtaaaacacagtattttaaataatgctggtatagaagacttgttttaaaatgaaccatgaatggcaatacatcatttttttattcacacgtcagattaaaagctgaatcttaaccagtcatagaaatattaaggaatacttgggttaaatatagttttcaattttctatctcttgttagcatttggcaaagcaagcaatacataaatagatccaatgttaaaaaccacaagagagaaaaatatataaaatatacagtagtttgtatccaccctgggccaacctacatctcagggaatcctccccaatcagattcacttctggctaaaagaaacatcagtcctgcagcaaaacagccccaggtctgcatcaaagaggctcgcacttcagtgtattcctccagggaagaggacaggagccagggtccctcgaatgccattccccaggtgttcaaaacgtaactaatttattagcaatagaagatttggtttataggggaatctcactggtccagtttgcagcctacaagaaaatggattatttttaaatataacattagaatataaataaacagtgaggatgtgactttttattccacagaaatgaaaacatttccaaacatgacaattcagtaagaaagcatgcctaccattgaaggtggagcccctccagattttttaatattctttgaaggcattccacgaaggcaactgagtctagcttggaaacctgagaaatcaaacaggcaatttagaagatactgtgatcactggagaatagaagaagatcctaacaacagaattaaaacgaagttgctgatggtggtgaacaccaagaatattaccggggaaaatgtgaaacatacttaagaactgaggcaattcccagcagggctctaatgcagtcggcacttaactagagagcactcagacagcaagaatgctctcccagtccagactcctgtaacagcttcctgatgagtgaaagcgaatgaatacagtccttggattgggccccgcacgtttctctacagcacactgtgtttacagtctgttcccactttggtctaccctttgtctcagtgaagaacccagggagagcccgagctgatggagccagcactcgggaagtgctactgacctcttctgccaggatgtgacatgagggggaaagaaccactgaggatgctttcaaacacggggtcaggtaggtctctgtctagctctgcagggtcttccttttcccaccagggcacaactccagcaataccacaggctccccctgactccttctcatagaaccaatcgctctgttcatcgtcccctgtgcaaagacaaaaatgcccccagaagatttagttttatcatggaaattgatatttaaagaacaacacttgttttctaatattgacctaggtgtaactttattataaatgacaatttaaaatttgcttaacctcagtgagtatcaaaattttgtcttcaaatgattaaaagtacaaaatgtagacagtttatgaaaataagagaaaagtaagattttaaatgagagtcactaaatcttcctaagattccccagaagccaccagtacttaaggctttttgtaagagttttcatatatgacaatcgtcttcccgtttatgagacttcagatttgagacctcttactctgaaattttaaaatggaaactgcaatcatgaaacaaaaacaatgctaaagaaaactgcctataacgtgagctgagaatactatatggcaaacagatttagttcaaataaacagtgaaaattaaaagcaattgtaatgtgaaaaccacaggagtggtttgaatcagggaataaaaaaatactttgctaaaatttataatactcaaatattgacatttcataggagagataatttttttttgttttttgttttttgagacagggtttctctgtgtagctttgtagaccaggctggcctcaaactcactgccctctgtttcccaagtgctggggttaaaggcgtgcgccaccactgctggcttgcagagagaaatttaaatgctgtagagcaggcctgttaactcaagcaaggactcacttgatgctgactgcatctgaatggccattaacccacttggggtgctgaggcacagtcaagaatgaaaggctaccttgtgccatataaacatagagcgtgtctcacaaagaaaaacaaacaaaaaccactctagaaaaatgaaattatttgactttacttttatatgatatgcaacattattcttaggaagtaacttaaatagtcattaaaagcatgggcaaggaatcagataagtgagttaaaaatccattgtcctgttacactgagaaagtcatttcaactgtattagtgcctgccccacttgaaaaataaataaaaattgggaactcacacagttcttaaaaaatgaagtgaagtgagaaccaagtaaattaaatgcagtaaagtcttaataactgttgctctgtcttatgccagtgactctgaaagatgtcagccttgctaagaagtcccttttgatgaaagtttatcattttatttcatcttatcatcaacctctataacctggataagatctgtattttaacaaaacataagtctgtagaatctactttctgctaatgcattctttttgttgttgcttggtttggtttggttcggtttttgagacagggtctcactaagtagctctggctggcctggaactcagatacctgcctgcctctgcttcttctaagtgctaggattaaggcgctggctaccgttcctggttctaataatgccttctaagaaataaagatactctgtgataagtacacataaggttagttcaacttcatgatttgtacaaggaataagggaaaacgagttatgggctgatgcgactaaattaaatcggtccaagcaagggtgactcctcacagcttcacaagggtatcaaatttttcacagcttcaaaatactgccatgttaaagtgtgaacagattctggaattttgcaggataaaaaacgcctaagatgtaacatagttctgtttaatagtttataatattaaattaataaaagccatttaattacttataaatggcatagtataagtataacaactgaataaaaatgacaaatcactgcaaatcactcttatgaatgcttacatggttttacaaacatctagaataaggtggagaataaaatcgatgtctggcaatcttgctaaaagggagcaaactacaaacactgacaaatgcaaagcttagtgacacatgctacttgttagacatctattattgggttaggatgccaagacatcctccatggagtatagaaaccagctgaatcactaagcagttcttgcaatattaaggggttagtgttggcagcttataaaataaccaggagtgtgcacaactttaaaatgaattttttttaagaggggaaaactatctcagtaccttgtcttccctcatcattggtgaacaagccggcgtcagtgctgctgagactgctggagtcactgtaagcaggaaaaggagaaaaatgaaacagatcaaaagaacaattgatctatcagtcgtaaaattttaaagagacatggcagctcagaaatggaacttgagcctgacaaagatctgaaagaaaataagattattattatttttaaatcaaactgcaaatatcccggttccattaactatggaacatagcatttggggcatgtccaggaatctaatgagacctggacagcgagccagatgtgacacaaggagatggggacacaagggatgcattctattatctgcttccatcaaatgccactgctccgttcttgtgcagtgcagtgtgatcagcttgagcctgaaaccccagtgctcactgagccagggcagtctccatcagaagcaggctgagactgtcttcatcccagaaacaccagggcctgggatgaaatgactttcataaccacattagcaaatgttctagaaaagccgctctcgaaaggaagaacggagtgatggtagcagtccactagctcacagtcaaacaatagagtgagttttaggccactattaagaagggttcccatacttcggtataaactggagaataaaacgcaggttcaaatttactatggaaattcagtaaattacacatactcagaaaaaaagaaccaaccactattagtctactggaagcaatatttatatgacagttcaaggaagtgaaaataggaagaaataagaacaagtcatgaaagccttggcccctaagaaaactgagtgttgttctttaaaagctcttatgtactttctcactcttgattcttgattttaatcaatcaagaaatcgtcactagggattttttttttaattaaaatagtcttttaaaagaaagtatttgtgtatggggggggggtgtgtgtgccaagatacgtttattgaggtcatagaggttagaggagttctgaaaatcaaacacagggcatcaggcttggtgcaaatgcctttaccttcatccctaaataaaaaaaaaaaataaataaataacctatccattaaaatataatacaatgtagcttagctttttaaaaattaggcacattagcctgttttacaaaattacaaaatatttatgatgaaaatcattgctagtcctaaatccacacattttttgcatacaatatttctaattttatttgcttttcaaaaataaactcatgaaaggtataagaatttgtcaagagacacattttttcccttcaaagctgcaatagtatttctaaggtgctgaactgacaccatcctatttacaagcacagatggtcttacattaaaaaaaaaaaaaaaagaaaaagaaaaagaaaaacacctcagaagcttgaccgtctagctatgtagtactggtccaaactatcactgcttttctggtttccttacaacccaaagttcttaaacacacctcaggcacaattccttttctgaaatgcccaagatacatatacttacaattcaaatcctttggattccacaagggcatactctataatgaccccagaagtctagtgtagcactccataatcagatcagctgcatttctcaattacaccaatgaatatgcttactgaacacaagttaagtccgaccacagtgagcctgcaaacagtgagtcagttgctatttttctgcagccagtctgctgggttcagatttaccatcctctaatctatcctacatacagccaagttcacctttttacagtataaatgggtgactacaggtgtaaaggtaatgccctggaacagaagggagccattttaaataaaaccaatggtaattctgataaaataccaacttaaaaacatatccatactcagtaacagtaaaatgaaattggttggggtgtgagaatgggaaaggcatgaactctgcaaactgttttggtaacgtttctgtaaattaaaagtagtcttttaaaaaggccctaaaacacactcatacacacacataccacctaaaatgacagctttctaggtaaaacataaagtattagtttagcttacagaatgaaacttagattccaaagctttctatgggtgggctccttacaaattctttccattctatgtttggtattcttgcttatgtcctttgtctaagaagcaatcctacctctgtccacatcctaatgaatctcaagacatgtggaaatctagattctaaatcagtctctaatgatccttgctctctatgtttttaatggacacattattgataactagccagttgctgcatgtactttgataactagccagttgctgcatgtacttccctgttgctatgctcattaagaataagaatttaacaagaaaggcttttcatttccagcagccaggttttgtttttttctgactagaaaccaggcattatttgagagca
